(19) United States
(12) Patent Application Publication
(10) Pub. No.: US 2026/0069625 A1
(43) Pub. Date: Mar. 12, 2026

(54) ORGANIC COMPOSITIONS TO TREAT KRAS-RELATED DISEASES

(71) Applicant: Arrowhead Pharmaceuticals, Inc., Pasadena, CA (US)

(72) Inventors: Brian Bettencourt, Cambridge, MA (US); Stuart Milstein, Cambridge, MA (US); Ivanka Toudjarska, Cambridge, MA (US); Earl McDonald, Cambridge, MA (US); Michael Schlabach, JR., Cambridge, MA (US); Frank P. Stegmeier, Acton, MA (US); Markus Warmuth, Cambridge, MA (US); Kalyani Gampa, Natick, MA (US); Dieter Huesken, Freiburg i. Br. (DE); Mark Stump, Lexington, MA (US); Jan Weiler, Newton, MA (US); Zainab Jagani, Brookline, MA (US)

(21) Appl. No.: 18/954,771

(22) Filed: Nov. 21, 2024

Related U.S. Application Data
(63) Continuation of application No. 18/749,208, filed on Jun. 20, 2024, now abandoned.
Application No. 18/749,208 is a continuation of application No. 18/441,085, filed on Feb. 14, 2024, now abandoned.
Application No. 18/441,085 is a continuation of application No. 18/472,469, filed on Sep. 22, 2023, now abandoned.
Application No. 18/472,469 is a continuation of application No. 18/306,618, filed on Apr. 25, 2023.
Application No. 18/306,618 is a continuation of application No. 17/820,318, filed on Aug. 17, 2022, now abandoned.
Application No. 17/820,318 is a continuation of application No. 17/739,497, filed on May 9, 2022, now abandoned.
Application No. 17/739,497 is a continuation of application No. 17/586,047, filed on Jan. 27, 2022, now abandoned.
Application No. 17/586,047 is a continuation of application No. 17/507,120, filed on Oct. 21, 2021, now abandoned.
Application No. 17/507,120 is a continuation of application No. 17/226,290, filed on Apr. 9, 2021, now abandoned.
Application No. 17/226,290 is a continuation of application No. 17/106,717, filed on Nov. 30, 2020, now abandoned.
Application No. 17/106,717 is a continuation of application No. 16/934,508, filed on Jul. 21, 2020, now abandoned.
Application No. 16/934,508 is a continuation of application No. 16/826,699, filed on Mar. 23, 2020, now abandoned.
Application No. 16/826,699 is a continuation of application No. 16/679,981, filed on Nov. 11, 2019, now abandoned.
Application No. 16/679,981 is a continuation of application No. 16/458,600, filed on Jul. 1, 2019, now abandoned.
Application No. 16/458,600 is a division of application No. 15/258,042, filed on Sep. 7, 2016, now abandoned.
Application No. 15/258,042 is a division of application No. 14/397,815, now abandoned.
(60) Provisional application No. 61/641,588, filed on May 2, 2012.

(51) Int. Cl. A61K 31/713; A61K 45/06; A61K 47/54; C12N 15/113

(52) U.S. Cl. CPC A61K 31/713; A61K 45/06; A61K 47/549; C12N 15/113; C12N 15/1135; C12N 2310/14; C12N 2310/344; C12N 2310/351

(57) ABSTRACT

The present disclosure relates to RNAi agents useful in methods of treating KRAS-related diseases such as a proliferative disease, including without limitation a solid or liquid cancer, adenocarcinoma, colorectal cancer, advanced and/or metastatic colorectal cancer, colon cancer, lung, non-small cell lung cancer and lung adenocarcinoma, acute myelogenous lung, bladder, brain, breast, cervical, endometrial, gastric, head and neck, kidney, leukemia, myelodysplastic syndrome, myeloid leukemia, liver, melanoma, ovarian, pancreatic, prostate, testicular, thyroid cancers, and cardio-facio-cutaneous (CFC) syndrome and Noonan syndrome, and similar and related diseases, using a therapeutically effective amount of a RNAi agent to KRAS.

### CROSS REFERENCE TO RELATED APPLICATIONS

[0001] This application is a continuation of U.S. patent application Ser. No. 18/749,208, filed on Jun. 20, 2024, which is a continuation of U.S. patent application Ser. No. 18/441,085, filed on Feb. 14, 2024, which is a continuation of U.S. patent application Ser. No. 18/472,469, filed Sep. 22, 2023, which is a continuation of U.S. patent application Ser. No. 18/306,618, filed Apr. 25, 2023, which is a continuation of U.S. patent application Ser. No. 17/820,318, filed Aug. 17, 2022, which is a continuation of U.S. patent application Ser. No. 17/739,497, filed May 9, 2022, which is a continuation of U.S. patent application Ser. No. 17/586,047, filed Jan. 27, 2022, which is continuation of U.S. patent application Ser. No. 17/507,120, filed Oct. 21, 2021, which is a continuation of U.S. patent application Ser. No. 17/226,290, filed Apr. 9, 2021, which is a continuation of U.S. patent application Ser. No. 17/106,717, filed Nov. 30, 2020, which is a continuation of U.S. patent application Ser. No. 16/934,508, filed Jul. 21, 2020, which is a continuation of U.S. patent application Ser. No. 16/826,699, filed Mar. 23, 2020, which is a continuation of U.S. patent application Ser. No. 16/679,981, filed Nov. 11, 2019, which is a continuation of U.S. patent application Ser. No. 16/458,600, filed Jul. 1, 2019, which is a divisional of U.S. patent application Ser. No. 15/258,042, filed Sep. 7, 2016, which is a divisional of U.S. patent application Ser. No. 14/397,815, filed Oct. 29, 2014, now abandoned, which is a U.S. National Phase Application under 35 U.S.C. § 371 of International Patent Application Ser. No. PCT/US2013/038847, filed Apr. 30, 2013, which claims priority to U.S. Provisional Application Ser. No. 61/641,588, filed May 2, 2012, the contents of each of which are incorporated herein by reference.

### SEQUENCE LISTING

[0002] This application contains a Sequence Listing (in compliance with Standard ST26), which has been submitted in xml format and is hereby incorporated by reference in its entirety. The xml sequence listing file is named N054420-US17_SeqListing.xml, created May 5, 2025, and is 12,595,666 bytes in size.

### BACKGROUND OF THE INVENTION

[0003] KRAS is a member of the RAS subfamily of small GTPases. It is involved in cellular signal transduction, growth, differentiation, survival and other cellular functions. Over-expression or hyper-activity of KRAS, along with RAS family members HRAS and NRAS, have been associated with a number of diseases, including various cancers. RAS mutations are found in approximately one-third of all human malignancies. Bos et al. 1989. Cancer Res. 49: 4682-4689. KRAS accounts for most of the RAS mutations found in the majority of human malignancies, including 90% of RAS mutations in lung adenocarcinomas. Forbes et al. 2006. Br. J. Cancer 94: 318-322.

[0004] Mutations, hyper-activity and/or over-expression of KRAS in particular has been associated with cancer, including adenocarcinoma, colorectal cancer (including advanced and metastatic colorectal cancer), colon cancer, lung (including non-small cell lung cancer and lung adenocarcinoma), acute myelogenous lung, bladder, brain, breast, cervical, endometrial, gastric, head and neck, kidney, leukemia, myelodysplastic syndrome, myeloid leukemia, liver, melanoma, ovarian, pancreatic, prostate, testicular, thyroid cancers, and cardio-facio-cutaneous (CFC) syndrome and Noonan syndrome, and similar and related diseases.

[0005] There exists the need for treatments related to KRAS-related diseases.

### BRIEF SUMMARY OF THE INVENTION

[0006] The present disclosure encompasses RNAi (RNA interference) agents to KRAS, which are useful in the treatment of KRAS-related diseases, such as cancer, cardio-facio-cutaneous (CFC) syndrome and Noonan syndrome, and similar and related diseases.

[0007] The present disclosure also encompasses a method of treating a human subject having a pathological state mediated at least in part by KRAS expression, the method comprising the step of administering to the subject a therapeutically effective amount of a RNAi agent KRAS.

[0008] The method also optionally further comprises the step of administering a second agent. In some embodiments, this second agent is another RNAi agent to KRAS. In other embodiments, the second agent is another treatment, such as one directed to another target, which is also hyper-active, mutated and/or over-expressed in the pathological state.

[0009] The present disclosure provides specific RNAi agents and methods that are useful in reducing KRAS levels in a subject, e.g., a mammal, such as a human. The present disclosure specifically provides double-stranded RNAi agents comprising at least 15 to at least 19 or more contiguous nucleotides of KRAS. In particular, the present disclosure provides agents comprising sequences of 15 or more contiguous nucleotides differing by 0, 1, 2 or 3 from those of the RNAi agents provided, e.g., in Tables 1 to 6. The RNAi agents particularly can in one embodiment comprise less than 30 nucleotides per strand, e.g., such as 17-23 nucleotides, 15-19, 18-22 nucleotides, and/or 19-21 nucleotides, and/or such as those provided, e.g., in Tables 1 to 6, and modified and unmodified variants thereof (e.g., wherein the sense and/or anti-sense or first and/or second strand are modified or unmodified).

[0010] The present disclosure also provides agents comprising a sense strand and an anti-sense strand, wherein the sense and/or the anti-sense strand comprise sequences of 19 or more contiguous nucleotides differing by 0, 1, 2 or 3 from those of the RNAi agents provided, e.g., in Tables 1 to 6, and modified or unmodified variants thereof. The sense and anti-sense strand can be contiguous, or covalently bounds, e.g., via a loop or linker. The RNAi agents particularly can in one embodiment comprise less than 30 nucleotides per strand, e.g., such as 17 to 23 nucleotides, 18 to 22 nucleotides, and/or 19 to 21 nucleotides, and/or sequences such as those provided, e.g., in Tables 1 to 6.

[0011] The double-stranded RNAi agents can have 0, 1 or 2 blunt ends, and/or overhangs of 1, 2, 3 or 4 nucleotides (i.e., 1 to 4 nt) from one or both 3′ and/or 5′ ends. The double-stranded RNAi agents can also optionally comprise one or two 3′ caps and/or one or more modified nucleotides. Modified variants of sequences as provided herein include those that are otherwise identical but contain substitutions of a naturally-occurring nucleotide for a corresponding modified nucleotide.

[0012] Furthermore, the RNAi agent can either contain only naturally-occurring nucleotide subunits (e.g., ribonucleotides), or one or more modifications to the sugar, phosphate or base of one or more of the replacement nucleotide subunits, whether they comprise ribonucleotide subunits or deoxyribonucleotide subunits or other related modified variants. In one embodiment, modified variants of the disclosed RNAi agents have a thymidine (as RNA, or, preferably, DNA) replacing a uridine, or have an inosine base. In some embodiments, the modified variants of the disclosed RNAi agents can have a nick in the passenger strand, mismatches between the guide and passenger strand, DNA replacing the RNA of a portion of both the guide and passenger strand (e.g., the seed region), and/or a shortened passenger strand (e.g., 15, 16, 17 or 18 nt). Once a functional guide strand is identified, modifications and variants of the RNAi agent can be readily made. Any combination of modifications which is not mutually exclusive can be (e.g., the combination of base modifications with shortened passenger strand; or nicked passenger strand and base modifications; or DNA replacing part or all of the seed region and base modifications in the remaining RNA; etc.).

[0013] In one embodiment, modified variants of the disclosed RNAi agents include RNAi agents with the same sequence (e.g., the same sequence of bases) as disclosed in Tables 1 to 6, but with one or more modifications to one or more of the sugar or phosphate of one or more of the nucleotide subunits. In one embodiment, the modifications improve efficacy, stability (e.g., against nucleases in, for example, blood serum or intestinal fluid), and/or reduce immunogenicity of the RNAi agent. One aspect of the present disclosure relates to a double-stranded oligonucleotide comprising at least one non-natural nucleobase. In certain embodiments, the non-natural nucleobase is difluorotolyl, nitroindolyl, nitropyrrolyl, or nitroimidazolyl. In a particular embodiment, the non-natural nucleobase is difluorotolyl. In certain embodiments, only one of the two oligonucleotide strands contains a non-natural nucleobase. In certain embodiments, both of the oligonucleotide strands contain a non-natural nucleobase.

[0014] The RNAi agent(s) can optionally be attached to a ligand selected to improve one or more characteristic, such as, e.g., stability, distribution and/or cellular uptake of the agent, e.g., cholesterol or a derivative thereof. The RNAi agent(s) can be isolated or be part of a pharmaceutical composition used for the methods described herein. Particularly, the pharmaceutical composition can be formulated for delivery to specific tissues (e.g., those afflicted with a KRAS-related disease) or formulated for parenteral administration. The pharmaceutical composition can optionally comprise two or more RNAi agents, each one directed to the same or a different segment of the KRAS mRNA. Optionally, the pharmaceutical composition can further comprise or be used in conjunction with any known treatment for any KRAS-related disease.

[0015] The present disclosure further provides methods for reducing the level of KRAS mRNA in a cell, particularly in the case of a disease characterized by over-expression or hyper-activity of KRAS. Cells comprising an alteration such as a mutation, over-expression and/or hyperactivity of KRAS are termed “KRAS-defective” cells. Such methods comprise the step of administering one or more of the RNAi agents of the present disclosure to a cell, as further described below. The present methods utilize the cellular mechanisms involved in RNA interference to selectively degrade the target RNA in a cell and are comprised of the step of contacting a cell with one or more of the RNAi agents of the present disclosure.

[0016] The present disclosure further provides methods for reducing the level of KRAS mRNA in a cell, particularly in the case of a disease characterized by over-expression, mutation or hyper-activity of KRAS. Such methods comprise the step of administering one or more of the RNAi agents of the present disclosure to a cell, as further described below. The present methods utilize the cellular mechanisms involved in RNA interference to selectively degrade the target RNA in a cell and are comprised of the step of contacting a cell with one or more of the RNAi agents of the present disclosure.

[0017] The present disclosure also encompasses a method of treating a human subject having a pathological state mediated at least in part by KRAS expression, the method comprising the step of administering to the subject a therapeutically effective amount of a RNAi agent targeting KRAS. Additional methods involve preventing, treating, modulating and/or ameliorating a pathological state wherein disease progression (e.g., tumor growth) requires KRAS, although KRAS is not amplified, over-expressed or mis-localized. Such methods comprise the step of administering one or more of the RNAi agents of the present disclosure to a subject, as further described below. The present methods utilize the cellular mechanisms involved in RNA interference to selectively degrade the target RNA in a cell comprise the step of contacting a cell with one or more of the RNAi agents of the present disclosure. Such methods can be performed directly on a cell or can be performed on a mammalian subject by administering to a subject one or more of the RNAi agents/pharmaceutical compositions of the present disclosure. Reduction of target KRAS RNA in a cell results in a reduction in the amount of encoded KRAS protein produced. In an organism, this can result in restoration of balance in a pathway involving KRAS, and/or prevention of KRAS accumulation, and/or a reduction in KRAS activity and/or expression, and/or prevention of KRAS-mediated activation of other genes, and/or amelioration, treatment and/or prevention of a KRAS-related disease. In one embodiment, a reduction in KRAS expression, level or activity can limit tumor growth.

[0018] The methods and compositions of the present disclosure, e.g., the methods and KRAS RNAi agent compositions, can be used in any appropriate dosage and/or formulation described herein or known in the art, as well as with any suitable route of administration described herein or known in the art.

[0019] The details of one or more embodiments of the present disclosure are set forth in the accompanying drawings and the description below. Elements of the various embodiments (e.g., sequences, modifications, endcaps, combinations of RNAi agents, combination therapy involving a KRAS RNAi agent and another agent, etc.) which are not mutually-exclusive can be combined with each other as described herein and as known or developed in the art. For example, any RNAi agent sequence disclosed herein can be combined with any set of modifications or endcaps disclosed herein. Any combination of modifications, 5′ end caps, and/or 3′ end caps can be used with any RNAi agent sequence disclosed herein. Any RNAi agent disclosed herein (with any combination of modifications or endcaps or without either modifications or endcaps) can be combined with any other RNAi agent or other treatment composition or method disclosed herein.

[0020] Other features, objects, and advantages of the present disclosure will be apparent from this description, the drawings, and from the claims.

### BRIEF DESCRIPTION OF THE FIGURE

[0021] FIG. 1 illustrates various modified nucleotides: U002, U003, U004, U005, 0004, 0005, A004, A005, G005, and G004, which can be used in the RNAi agents disclosed herein. U002 indicates a 2′-deoxy-thymidine which is DNA. U003 indicates 2′-deoxy uridine. U004 indicates a nucleotide with a Uridine (“U”) base with a 2′-O-methyl modification. U005 indicates a U base with a 2′-O-methoxyethyl (MOE) modification. 0004 indicates a Cysteine (“C”) base with a 2′-O-methyl modification. 0005 indicates a C base with 2′-O-methoxyethyl modification. A004 indicates an Adenosine (“A”) base with a 2′-O-methyl modification. A005 indicates an A base with 2′-O-methoxyethyl modification. G005 indicates a Guanosine (“G”) base with a 2′O-methyl modification. G004 indicates a G base with a 2′O-methyl modification.

### DETAILED DESCRIPTION OF THE INVENTION

[0022] The present disclosure encompasses RNAi agents to KRAS, for targeting and inhibition of the KRAS gene, which are useful in treatment of KRAS-related diseases (e.g., diseases associated with mutations in and/or altered expression, level and/or activity of KRAS, and/or diseases which require KRAS, and/or diseases treatable by modulating the expression, level and/or activity of KRAS), such as a proliferative disease, including without limitation a solid or liquid cancer, adenocarcinoma, colorectal cancer, advanced and/or metastatic colorectal cancer, colon cancer, lung, non-small cell lung cancer and lung adenocarcinoma, acute myelogenous lung, bladder, brain, breast, cervical, endometrial, gastric, head and neck, kidney, leukemia, myelodysplastic syndrome, myeloid leukemia, liver or hepatic, melanoma, ovarian, pancreatic, prostate, testicular, thyroid cancers, and cardio-facio-cutaneous (CFC) syndrome and Noonan syndrome, and similar and related diseases. The present disclosure also provides methods of treating a human subject having a pathological state mediated at least in part by KRAS expression or over-expression or hyper-activity, the method comprising the step of administering to the subject a therapeutically effective amount of a RNAi agent to KRAS.

[0023] Various embodiments of the present disclosure include the following.

[0024] In one embodiment, the present disclosure relates to a composition comprising a RNAi agent comprising a sense strand and an antisense strand, wherein the antisense strand comprises at least 15 contiguous nucleotides differing by 0, 1, 2, or 3 nucleotides from the antisense strand of a RNAi agent specific to KRAS (or any set of overlapping RNAi agents specific to KRAS) provided, e.g., in any of Tables 1 to 6. In another embodiment, the present disclosure relates to a composition comprising a RNAi agent comprising a sense and an anti-sense strand, wherein the sense strand comprises at least 15 contiguous nucleotides differing by 0, 1, 2, or 3 nucleotides from the sense strand of a RNAi agent from any sequence provided herein. In another embodiment, the present disclosure relates to a composition comprising a RNAi agent comprising a first strand and a second strand, wherein the first strand comprises at least 15 contiguous nucleotides differing by 0, 1, 2, or 3 nucleotides from the sequence of the first strand, and the second strand comprises at least 15 contiguous nucleotides differing by 0, 1, 2, or 3 nucleotides from the sequence of the second strand of any RNAi agent provided herein.

[0025] Particular duplexes include the example unmodified (e.g., “generic”) and example modified sequences listed in Table 1. In addition to the described example modifications, other modified variants are contemplated and can be made using the nucleotide sequences provided. In various embodiments, the first and/or second strand are modified or unmodified or a combination of one modified and one unmodified.

### RNAi Agents Comprising an Antisense and a Sense Strand Described Herein

[0026] In one embodiment, the present disclosure relates to a composition comprising a RNAi agent comprising an antisense strand, wherein the antisense strand comprises at least 15 contiguous nucleotides differing by 0, 1, 2, or 3 nucleotides from the antisense strand of a RNAi agent to KRAS selected from any sequence (or overlapping set of sequences) provided in a table herein (e.g., any of Tables 1 to 6). In one embodiment, the present disclosure relates to a composition comprising a RNAi agent comprising a sense strand and an antisense strand, wherein the antisense strand comprises at least 15 contiguous nucleotides differing by 0 nucleotides from the antisense strand of a RNAi agent to KRAS selected from any sequence (or overlapping set of sequences) provided in a table here (e.g., any of Tables 1 to 6). In another embodiment, the present disclosure relates to a composition comprising a RNAi agent comprising a sense and an anti-sense strand, wherein the sequence of the anti-sense strand comprises the sequence of the anti-sense strand of a RNAi agent from any sequence provided herein. In another embodiment, the present disclosure relates to a composition comprising a RNAi agent comprising a first strand and a second strand, wherein the sequence of the first strand is the sequence of the first strand of any RNAi agent provided herein. Particular duplexes include those specific duplexes provided above and as listed in any one or more of Table 1. Additional modified sequences (e.g., sequences comprising one or more modified base) of each of the compositions above are also contemplated as part of the present disclosure.

### Table 1. SEQ ID NOs. for RNAi Agents to KRAS

[0027] Provided in Table 1 are the nicknames of various KRAS RNAi duplexes; the SEQ ID NOs. of unmodified (e.g., “generic”) sense and anti-sense sequences; and the SEQ ID NOs. for example sense and anti-sense strands.

[0028] Table 1, below, provides the SEQ ID NOs for the unmodified and an example modified sequence of the sense and an anti-sense strands of various RNAi agents to KRAS. The base composition of each sequence represented by a SEQ ID NO is provided in more detail in Tables 2 and 3. Table 4 shows overlapping groups of these KRAS RNAi agents. Tables 5 and 6 show efficacy of various KRAS RNAi agents.

TABLE 1
SEQ ID NOs for unmodified and example modified sequences
of a first and a second strand (e.g., sense and anti-sense
strand) for RNAi agents to KRAS.

| | unmodified | | example modified | |
|---|---|---|---|---|
| | sequences | | sequenses | |
| | Sense | anti-sense | Sense | anti-sense |
| | SEQ ID | SEQ ID | SEQ ID | SEQ ID |
| Duplex | NO: | NO: | NO: | NO: |
| AD-35523.3 | 1 | 428 | 855 | 1282 |
| AD-35529.1 | 2 | 429 | 856 | 1283 |
| AD-35535.4 | 3 | 430 | 857 | 1284 |
| AD-35541.4 | 4 | 431 | 858 | 1285 |
| AD-35547.4 | 5 | 432 | 859 | 1286 |
| AD-35553.4 | 6 | 433 | 860 | 1287 |
| AD-35559.4 | 7 | 434 | 861 | 1288 |
| AD-35565.4 | 8 | 435 | 862 | 1289 |
| AD-35524.4 | 9 | 436 | 863 | 1290 |
| AD-35530.4 | 10 | 437 | 864 | 1291 |
| AD-35536.4 | 11 | 438 | 865 | 1292 |
| AD-35542.4 | 12 | 439 | 866 | 1293 |
| AD-35548.4 | 13 | 440 | 867 | 1294 |
| AD-35554.4 | 14 | 441 | 868 | 1295 |
| AD-35560.2 | 15 | 442 | 869 | 1296 |
| AD-35566.4 | 16 | 443 | 870 | 1297 |
| AD-35525.2 | 17 | 444 | 871 | 1298 |
| AD-35531.4 | 18 | 445 | 872 | 1299 |
| AD-35537.4 | 19 | 446 | 873 | 1300 |
| AD-35543.2 | 20 | 447 | 874 | 1301 |
| AD-35549.4 | 21 | 448 | 875 | 1302 |
| AD-35555.4 | 22 | 449 | 876 | 1303 |
| AD-35561.4 | 23 | 450 | 877 | 1304 |
| AD-35567.4 | 24 | 451 | 878 | 1305 |
| AD-35526.4 | 25 | 452 | 879 | 1306 |
| AD-35532.4 | 26 | 453 | 880 | 1307 |
| AD-35538.4 | 27 | 454 | 881 | 1308 |
| AD-35544.4 | 28 | 455 | 882 | 1309 |
| AD-35550.4 | 29 | 456 | 883 | 1310 |
| AD-35556.4 | 30 | 457 | 884 | 1311 |
| AD-35562.4 | 31 | 458 | 885 | 1312 |
| AD-35568.4 | 32 | 459 | 886 | 1313 |
| AD-35527.4 | 33 | 460 | 887 | 1314 |
| AD-35533.4 | 34 | 461 | 888 | 1315 |
| AD-35539.4 | 35 | 462 | 889 | 1316 |
| AD-35545.4 | 36 | 463 | 890 | 1317 |
| AD-35551.4 | 37 | 464 | 891 | 1318 |
| AD-35563.4 | 38 | 465 | 892 | 1319 |
| AD-35528.4 | 39 | 466 | 893 | 1320 |
| AD-35540.4 | 40 | 467 | 894 | 1321 |
| AD-35546.4 | 41 | 468 | 895 | 1322 |
| AD-35552.4 | 42 | 469 | 896 | 1323 |
| AD-35558.4 | 43 | 470 | 897 | 1324 |
| AD-35564.4 | 44 | 471 | 898 | 1325 |
| AD-35570.4 | 45 | 472 | 899 | 1326 |
| AD-35571.4 | 46 | 473 | 900 | 1327 |
| AD-35577.4 | 47 | 474 | 901 | 1328 |
| AD-35583.4 | 48 | 475 | 902 | 1329 |
| AD-35589.4 | 49 | 476 | 903 | 1330 |
| AD-35595.4 | 50 | 477 | 904 | 1331 |
| AD-35601.4 | 51 | 478 | 905 | 1332 |
| AD-35607.4 | 52 | 479 | 906 | 1333 |
| AD-35613.4 | 53 | 480 | 907 | 1334 |
| AD-35572.4 | 54 | 481 | 908 | 1335 |
| AD-35578.4 | 55 | 482 | 909 | 1336 |
| AD-35584.4 | 56 | 483 | 910 | 1337 |
| AD-35590.4 | 57 | 484 | 911 | 1338 |
| AD-35596.4 | 58 | 485 | 912 | 1339 |
| AD-35602.4 | 59 | 486 | 913 | 1340 |
| AD-35608.4 | 60 | 487 | 914 | 1341 |
| AD-35614.4 | 61 | 488 | 915 | 1342 |
| AD-35573.4 | 62 | 489 | 916 | 1343 |
| AD-35579.4 | 63 | 490 | 917 | 1344 |
| AD-35585.4 | 64 | 491 | 918 | 1345 |
| AD-35591.4 | 65 | 492 | 919 | 1346 |
| AD-35597.4 | 66 | 493 | 920 | 1347 |
| AD-35603.4 | 67 | 494 | 921 | 1348 |
| AD-35609.4 | 68 | 495 | 922 | 1349 |
| AD-35615.4 | 69 | 496 | 923 | 1350 |
| AD-35574.4 | 70 | 497 | 924 | 1351 |
| AD-35580.1 | 71 | 498 | 925 | 1352 |
| AD-35586.4 | 72 | 499 | 926 | 1353 |
| AD-35592.4 | 73 | 500 | 927 | 1354 |
| AD-35598.4 | 74 | 501 | 928 | 1355 |
| AD-35604.4 | 75 | 502 | 929 | 1356 |
| AD-35610.4 | 76 | 503 | 930 | 1357 |
| AD-35616.4 | 77 | 504 | 931 | 1358 |
| AD-35575.4 | 78 | 505 | 932 | 1359 |
| AD-35581.4 | 79 | 506 | 933 | 1360 |
| AD-35587.4 | 80 | 507 | 934 | 1361 |
| AD-35593.4 | 81 | 508 | 935 | 1362 |
| AD-35599.4 | 82 | 509 | 936 | 1363 |
| AD-35605.4 | 83 | 510 | 937 | 1364 |
| AD-35611.4 | 84 | 511 | 938 | 1365 |
| AD-35617.4 | 85 | 512 | 939 | 1366 |
| AD-35576.4 | 86 | 513 | 940 | 1367 |
| AD-35588.4 | 87 | 514 | 941 | 1368 |
| AD-35667.1 | 88 | 515 | 942 | 1369 |
| AD-35673.1 | 89 | 516 | 943 | 1370 |
| AD-35679.1 | 90 | 517 | 944 | 1371 |
| AD-35685.1 | 91 | 518 | 945 | 1372 |
| AD-35691.1 | 92 | 519 | 946 | 1373 |
| AD-35557.1 | 93 | 520 | 947 | 1374 |
| AD-35618.1 | 94 | 521 | 948 | 1375 |
| AD-35569.1 | 95 | 522 | 949 | 1376 |
| AD-35534.1 | 96 | 523 | 950 | 1377 |
| AD-35582.1 | 97 | 524 | 951 | 1378 |
| AD-35594.1 | 98 | 525 | 952 | 1379 |
| AD-35600.1 | 99 | 526 | 953 | 1380 |
| AD-35606.1 | 100 | 527 | 954 | 1381 |
| AD-35612.1 | 101 | 528 | 955 | 1382 |
| AD-38127.1 | 102 | 529 | 956 | 1383 |
| AD-38133.1 | 103 | 530 | 957 | 1384 |
| AD-38139.1 | 104 | 531 | 958 | 1385 |
| AD-38145.1 | 105 | 532 | 959 | 1386 |
| AD-38151.1 | 106 | 533 | 960 | 1387 |
| AD-38157.1 | 107 | 534 | 961 | 1388 |
| AD-38163.1 | 108 | 535 | 962 | 1389 |
| AD-38169.1 | 109 | 536 | 963 | 1390 |
| AD-38128.1 | 110 | 537 | 964 | 1391 |
| AD-38134.1 | 111 | 538 | 965 | 1392 |
| AD-38140.1 | 112 | 539 | 966 | 1393 |
| AD-38146.1 | 113 | 540 | 967 | 1394 |
| AD-38152.1 | 114 | 541 | 968 | 1395 |
| AD-38158.1 | 115 | 542 | 969 | 1396 |
| AD-38164.1 | 116 | 543 | 970 | 1397 |
| AD-38170.1 | 117 | 544 | 971 | 1398 |
| AD-38129.1 | 118 | 545 | 972 | 1399 |
| AD-38135.1 | 119 | 546 | 973 | 1400 |
| AD-38141.1 | 120 | 547 | 974 | 1401 |
| AD-38147.1 | 121 | 548 | 975 | 1402 |
| AD-38153.1 | 122 | 549 | 976 | 1403 |
| AD-38159.1 | 123 | 550 | 977 | 1404 |
| AD-38165.1 | 124 | 551 | 978 | 1405 |
| AD-38171.1 | 125 | 552 | 979 | 1406 |
| AD-38130.1 | 126 | 553 | 980 | 1407 |
| AD-38136.1 | 127 | 554 | 981 | 1408 |
| AD-38142.1 | 128 | 555 | 982 | 1409 |
| AD-38148.1 | 129 | 556 | 983 | 1410 |
| AD-38154.1 | 130 | 557 | 984 | 1411 |
| AD-38160.1 | 131 | 558 | 985 | 1412 |
| AD-38166.1 | 132 | 559 | 986 | 1413 |
| AD-38172.1 | 133 | 560 | 987 | 1414 |
| AD-38131.1 | 134 | 561 | 988 | 1415 |
| AD-38137.1 | 135 | 562 | 989 | 1416 |
| AD-38143.1 | 136 | 563 | 990 | 1417 |
| AD-38149.1 | 137 | 564 | 991 | 1418 |
| AD-38155.1 | 138 | 565 | 992 | 1419 |
| AD-38161.1 | 139 | 566 | 993 | 1420 |
| AD-38167.1 | 140 | 567 | 994 | 1421 |
| AD-38173.1 | 141 | 568 | 995 | 1422 |
| AD-38132.1 | 142 | 569 | 996 | 1423 |
| AD-38138.1 | 143 | 570 | 997 | 1424 |
| AD-38144.1 | 144 | 571 | 998 | 1425 |
| AD-38150.1 | 145 | 572 | 999 | 1426 |
| AD-38156.1 | 146 | 573 | 1000 | 1427 |
| AD-38162.1 | 147 | 574 | 1001 | 1428 |
| AD-38168.1 | 148 | 575 | 1002 | 1429 |
| AD-38174.1 | 149 | 576 | 1003 | 1430 |
| AD-39683.1 | 150 | 577 | 1004 | 1431 |
| AD-39689.1 | 151 | 578 | 1005 | 1432 |
| AD-39695.1 | 152 | 579 | 1006 | 1433 |
| AD-39701.1 | 153 | 580 | 1007 | 1434 |
| AD-39707.1 | 154 | 581 | 1008 | 1435 |
| AD-39713.1 | 155 | 582 | 1009 | 1436 |
| AD-39719.1 | 156 | 583 | 1010 | 1437 |
| AD-39725.1 | 157 | 584 | 1011 | 1438 |
| AD-39684.1 | 158 | 585 | 1012 | 1439 |
| AD-39690.1 | 159 | 586 | 1013 | 1440 |
| AD-39696.1 | 160 | 587 | 1014 | 1441 |
| AD-39702.1 | 161 | 588 | 1015 | 1442 |
| AD-39708.1 | 162 | 589 | 1016 | 1443 |
| AD-39714.1 | 163 | 590 | 1017 | 1444 |
| AD-39720.1 | 164 | 591 | 1018 | 1445 |
| AD-39726.1 | 165 | 592 | 1019 | 1446 |
| AD-39685.1 | 166 | 593 | 1020 | 1447 |
| AD-39691.1 | 167 | 594 | 1021 | 1448 |
| AD-39697.1 | 168 | 595 | 1022 | 1449 |
| AD-39703.1 | 169 | 596 | 1023 | 1450 |
| AD-39709.1 | 170 | 597 | 1024 | 1451 |
| AD-39715.1 | 171 | 598 | 1025 | 1452 |
| AD-39721.1 | 172 | 599 | 1026 | 1453 |
| AD-39727.1 | 173 | 600 | 1027 | 1454 |
| AD-39686.1 | 174 | 601 | 1028 | 1455 |
| AD-39692.1 | 175 | 602 | 1029 | 1456 |
| AD-39698.1 | 176 | 603 | 1030 | 1457 |
| AD-39704.1 | 177 | 604 | 1031 | 1458 |
| AD-39710.1 | 178 | 605 | 1032 | 1459 |
| AD-39716.1 | 179 | 606 | 1033 | 1460 |
| AD-39722.1 | 180 | 607 | 1034 | 1461 |
| AD-39728.1 | 181 | 608 | 1035 | 1462 |
| AD-39687.1 | 182 | 609 | 1036 | 1463 |
| AD-39693.1 | 183 | 610 | 1037 | 1464 |
| AD-39699.1 | 184 | 611 | 1038 | 1465 |
| AD-39705.1 | 185 | 612 | 1039 | 1466 |
| AD-39711.1 | 186 | 613 | 1040 | 1467 |
| AD-39717.1 | 187 | 614 | 1041 | 1468 |
| AD-39723.1 | 188 | 615 | 1042 | 1469 |
| AD-39729.1 | 189 | 616 | 1043 | 1470 |
| AD-39688.1 | 190 | 617 | 1044 | 1471 |
| AD-39694.1 | 191 | 618 | 1045 | 1472 |
| AD-39700.1 | 192 | 619 | 1046 | 1473 |
| AD-39706.1 | 193 | 620 | 1047 | 1474 |
| AD-39712.1 | 194 | 621 | 1048 | 1475 |
| AD-39718.1 | 195 | 622 | 1049 | 1476 |
| AD-39724.1 | 196 | 623 | 1050 | 1477 |
| AD-39730.1 | 197 | 624 | 1051 | 1478 |
| AD-39736.1 | 198 | 625 | 1052 | 1479 |
| AD-39742.1 | 199 | 626 | 1053 | 1480 |
| AD-39748.1 | 200 | 627 | 1054 | 1481 |
| AD-39754.1 | 201 | 628 | 1055 | 1482 |
| AD-39760.1 | 202 | 629 | 1056 | 1483 |
| AD-39766.1 | 203 | 630 | 1057 | 1484 |
| AD-39772.1 | 204 | 631 | 1058 | 1485 |
| AD-39731.1 | 205 | 632 | 1059 | 1486 |
| AD-39737.1 | 206 | 633 | 1060 | 1487 |
| AD-39743.1 | 207 | 634 | 1061 | 1488 |
| AD-39749.1 | 208 | 635 | 1062 | 1489 |
| AD-39755.1 | 209 | 636 | 1063 | 1490 |
| AD-39761.1 | 210 | 637 | 1064 | 1491 |
| AD-39767.1 | 211 | 638 | 1065 | 1492 |
| AD-39773.1 | 212 | 639 | 1066 | 1493 |
| AD-39732.1 | 213 | 640 | 1067 | 1494 |
| AD-39738.1 | 214 | 641 | 1068 | 1495 |
| AD-39744.1 | 215 | 642 | 1069 | 1496 |
| AD-39750.1 | 216 | 643 | 1070 | 1497 |
| AD-39756.1 | 217 | 644 | 1071 | 1498 |
| AD-39762.1 | 218 | 645 | 1072 | 1499 |
| AD-39768.1 | 219 | 646 | 1073 | 1500 |
| AD-39774.1 | 220 | 647 | 1074 | 1501 |
| AD-39733.1 | 221 | 648 | 1075 | 1502 |
| AD-39739.1 | 222 | 649 | 1076 | 1503 |
| AD-39745.1 | 223 | 650 | 1077 | 1504 |
| AD-39751.1 | 224 | 651 | 1078 | 1505 |
| AD-39757.1 | 225 | 652 | 1079 | 1506 |
| AD-39763.1 | 226 | 653 | 1080 | 1507 |
| AD-39769.1 | 227 | 654 | 1081 | 1508 |
| AD-39775.1 | 228 | 655 | 1082 | 1509 |
| AD-39734.1 | 229 | 656 | 1083 | 1510 |
| AD-39740.1 | 230 | 657 | 1084 | 1511 |
| AD-39746.1 | 231 | 658 | 1085 | 1512 |
| AD-39752.1 | 232 | 659 | 1086 | 1513 |
| AD-39758.1 | 233 | 660 | 1087 | 1514 |
| AD-39764.1 | 234 | 661 | 1088 | 1515 |
| AD-39770.1 | 235 | 662 | 1089 | 1516 |
| AD-39776.1 | 236 | 663 | 1090 | 1517 |
| AD-39735.1 | 237 | 664 | 1091 | 1518 |
| AD-39741.1 | 238 | 665 | 1092 | 1519 |
| AD-39747.1 | 239 | 666 | 1093 | 1520 |
| AD-39753.1 | 240 | 667 | 1094 | 1521 |
| AD-39759.1 | 241 | 668 | 1095 | 1522 |
| AD-39765.1 | 242 | 669 | 1096 | 1523 |
| AD-39771.1 | 243 | 670 | 1097 | 1524 |
| AD-39778.1 | 244 | 671 | 1098 | 1525 |
| AD-39784.1 | 245 | 672 | 1099 | 1526 |
| AD-39790.1 | 246 | 673 | 1100 | 1527 |
| AD-39796.1 | 247 | 674 | 1101 | 1528 |
| AD-39802.1 | 248 | 675 | 1102 | 1529 |
| AD-39808.1 | 249 | 676 | 1103 | 1530 |
| AD-39814.1 | 250 | 677 | 1104 | 1531 |
| AD-39820.1 | 251 | 678 | 1105 | 1532 |
| AD-39779.1 | 252 | 679 | 1106 | 1533 |
| AD-39785.1 | 253 | 680 | 1107 | 1534 |
| AD-39791.1 | 254 | 681 | 1108 | 1535 |
| AD-39797.1 | 255 | 682 | 1109 | 1536 |
| AD-39803.1 | 256 | 683 | 1110 | 1537 |
| AD-39809.1 | 257 | 684 | 1111 | 1538 |
| AD-39815.1 | 258 | 685 | 1112 | 1539 |
| AD-39821.1 | 259 | 686 | 1113 | 1540 |
| AD-39780.1 | 260 | 687 | 1114 | 1541 |
| AD-39786.1 | 261 | 688 | 1115 | 1542 |
| AD-39792.1 | 262 | 689 | 1116 | 1543 |
| AD-39798.1 | 263 | 690 | 1117 | 1544 |
| AD-39804.1 | 264 | 691 | 1118 | 1545 |
| AD-39810.1 | 265 | 692 | 1119 | 1546 |
| AD-39816.1 | 266 | 693 | 1120 | 1547 |
| AD-39822.1 | 267 | 694 | 1121 | 1548 |
| AD-39781.1 | 268 | 695 | 1122 | 1549 |
| AD-39787.1 | 269 | 696 | 1123 | 1550 |
| AD-39793.1 | 270 | 697 | 1124 | 1551 |
| AD-39799.1 | 271 | 698 | 1125 | 1552 |
| AD-39805.1 | 272 | 699 | 1126 | 1553 |
| AD-39811.1 | 273 | 700 | 1127 | 1554 |
| AD-39817.1 | 274 | 701 | 1128 | 1555 |
| AD-39823.1 | 275 | 702 | 1129 | 1556 |
| AD-39782.1 | 276 | 703 | 1130 | 1557 |
| AD-39788.1 | 277 | 704 | 1131 | 1558 |
| AD-39794.1 | 278 | 705 | 1132 | 1559 |
| AD-39800.1 | 279 | 706 | 1133 | 1560 |
| AD-39806.1 | 280 | 707 | 1134 | 1561 |
| AD-39812.1 | 281 | 708 | 1135 | 1562 |
| AD-39818.1 | 282 | 709 | 1136 | 1563 |
| AD-39824.1 | 283 | 710 | 1137 | 1564 |
| AD-39783.1 | 284 | 711 | 1138 | 1565 |
| AD-39789.1 | 285 | 712 | 1139 | 1566 |
| AD-39795.1 | 286 | 713 | 1140 | 1567 |
| AD-39801.1 | 287 | 714 | 1141 | 1568 |
| AD-39807.1 | 288 | 715 | 1142 | 1569 |
| AD-39813.1 | 289 | 716 | 1143 | 1570 |
| AD-39819.1 | 290 | 717 | 1144 | 1571 |
| AD-39825.1 | 291 | 718 | 1145 | 1572 |
| AD-39831.1 | 292 | 719 | 1146 | 1573 |
| AD-39837.1 | 293 | 720 | 1147 | 1574 |
| AD-39843.1 | 294 | 721 | 1148 | 1575 |
| AD-39849.1 | 295 | 722 | 1149 | 1576 |
| AD-39855.1 | 296 | 723 | 1150 | 1577 |
| AD-39861.1 | 297 | 724 | 1151 | 1578 |
| AD-39867.1 | 298 | 725 | 1152 | 1579 |
| AD-39826.1 | 299 | 726 | 1153 | 1580 |
| AD-39832.1 | 300 | 727 | 1154 | 1581 |
| AD-39838.1 | 301 | 728 | 1155 | 1582 |
| AD-39844.1 | 302 | 729 | 1156 | 1583 |
| AD-39850.1 | 303 | 730 | 1157 | 1584 |
| AD-39856.1 | 304 | 731 | 1158 | 1585 |
| AD-39862.1 | 305 | 732 | 1159 | 1586 |
| AD-39868.1 | 306 | 733 | 1160 | 1587 |
| AD-39827.1 | 307 | 734 | 1161 | 1588 |
| AD-39833.1 | 308 | 735 | 1162 | 1589 |
| AD-39839.1 | 309 | 736 | 1163 | 1590 |
| AD-39845.1 | 310 | 737 | 1164 | 1591 |
| AD-39851.1 | 311 | 738 | 1165 | 1592 |
| AD-39857.1 | 312 | 739 | 1166 | 1593 |
| AD-39863.1 | 313 | 740 | 1167 | 1594 |
| AD-39869.1 | 314 | 741 | 1168 | 1595 |
| AD-39828.1 | 315 | 742 | 1169 | 1596 |
| AD-39834.1 | 316 | 743 | 1170 | 1597 |
| AD-39840.1 | 317 | 744 | 1171 | 1598 |
| AD-39846.1 | 318 | 745 | 1172 | 1599 |
| AD-39852.1 | 319 | 746 | 1173 | 1600 |
| AD-39858.1 | 320 | 747 | 1174 | 1601 |
| AD-39864.1 | 321 | 748 | 1175 | 1602 |
| AD-39870.1 | 322 | 749 | 1176 | 1603 |
| AD-39829.1 | 323 | 750 | 1177 | 1604 |
| AD-39835.1 | 324 | 751 | 1178 | 1605 |
| AD-39841.1 | 325 | 752 | 1179 | 1606 |
| AD-39853.1 | 326 | 753 | 1180 | 1607 |
| AD-39859.1 | 327 | 754 | 1181 | 1608 |
| AD-39865.1 | 328 | 755 | 1182 | 1609 |
| AD-39871.1 | 329 | 756 | 1183 | 1610 |
| AD-39830.1 | 330 | 757 | 1184 | 1611 |
| AD-39836.1 | 331 | 758 | 1185 | 1612 |
| AD-39842.1 | 332 | 759 | 1186 | 1613 |
| AD-39848.1 | 333 | 760 | 1187 | 1614 |
| AD-39854.1 | 334 | 761 | 1188 | 1615 |
| AD-39860.1 | 335 | 762 | 1189 | 1616 |
| AD-39866.1 | 336 | 763 | 1190 | 1617 |
| AD-39992.1 | 337 | 764 | 1191 | 1618 |
| AD-39998.1 | 338 | 765 | 1192 | 1619 |
| AD-40004.1 | 339 | 766 | 1193 | 1620 |
| AD-40010.1 | 340 | 767 | 1194 | 1621 |
| AD-40016.1 | 341 | 768 | 1195 | 1622 |
| AD-40022.1 | 342 | 769 | 1196 | 1623 |
| AD-40028.1 | 343 | 770 | 1197 | 1624 |
| AD-40034.1 | 344 | 771 | 1198 | 1625 |
| AD-39999.1 | 345 | 772 | 1199 | 1626 |
| AD-40005.1 | 346 | 773 | 1200 | 1627 |
| AD-40011.1 | 347 | 774 | 1201 | 1628 |
| AD-40017.1 | 348 | 775 | 1202 | 1629 |
| AD-40029.1 | 349 | 776 | 1203 | 1630 |
| AD-40035.1 | 350 | 777 | 1204 | 1631 |
| AD-39994.1 | 351 | 778 | 1205 | 1632 |
| AD-40000.1 | 352 | 779 | 1206 | 1633 |
| AD-40006.1 | 353 | 780 | 1207 | 1634 |
| AD-40012.1 | 354 | 781 | 1208 | 1635 |
| AD-40018.1 | 355 | 782 | 1209 | 1636 |
| AD-40024.1 | 356 | 783 | 1210 | 1637 |
| AD-40030.1 | 357 | 784 | 1211 | 1638 |
| AD-40036.1 | 358 | 785 | 1212 | 1639 |
| AD-39995.1 | 359 | 786 | 1213 | 1640 |
| AD-40001.1 | 360 | 787 | 1214 | 1641 |
| AD-40007.1 | 361 | 788 | 1215 | 1642 |
| AD-40013.1 | 362 | 789 | 1216 | 1643 |
| AD-40019.1 | 363 | 790 | 1217 | 1644 |
| AD-40025.1 | 364 | 791 | 1218 | 1645 |
| AD-40031.1 | 365 | 792 | 1219 | 1646 |
| AD-40037.1 | 366 | 793 | 1220 | 1647 |
| AD-39996.1 | 367 | 794 | 1221 | 1648 |
| AD-40002.1 | 368 | 795 | 1222 | 1649 |
| AD-40008.1 | 369 | 796 | 1223 | 1650 |
| AD-40014.1 | 370 | 797 | 1224 | 1651 |
| AD-40020.1 | 371 | 798 | 1225 | 1652 |
| AD-40026.1 | 372 | 799 | 1226 | 1653 |
| AD-40032.1 | 373 | 800 | 1227 | 1654 |
| AD-40038.1 | 374 | 801 | 1228 | 1655 |
| AD-39997.1 | 375 | 802 | 1229 | 1656 |
| AD-40009.1 | 376 | 803 | 1230 | 1657 |
| AD-40015.1 | 377 | 804 | 1231 | 1658 |
| AD-40021.1 | 378 | 805 | 1232 | 1659 |
| AD-40027.1 | 379 | 806 | 1233 | 1660 |
| AD-40033.1 | 380 | 807 | 1234 | 1661 |
| AD-40039.1 | 381 | 808 | 1235 | 1662 |
| AD-40045.1 | 382 | 809 | 1236 | 1663 |
| AD-40051.1 | 383 | 810 | 1237 | 1664 |
| AD-40057.1 | 384 | 811 | 1238 | 1665 |
| AD-40063.1 | 385 | 812 | 1239 | 1666 |
| AD-40069.1 | 386 | 813 | 1240 | 1667 |
| AD-40075.1 | 387 | 814 | 1241 | 1668 |
| AD-40081.1 | 388 | 815 | 1242 | 1669 |
| AD-40040.1 | 389 | 816 | 1243 | 1670 |
| AD-40046.1 | 390 | 817 | 1244 | 1671 |
| AD-40052.1 | 391 | 818 | 1245 | 1672 |
| AD-40058.1 | 392 | 819 | 1246 | 1673 |
| AD-40064.1 | 393 | 820 | 1247 | 1674 |
| AD-40070.1 | 394 | 821 | 1248 | 1675 |
| AD-40076.1 | 395 | 822 | 1249 | 1676 |
| AD-40082.1 | 396 | 823 | 1250 | 1677 |
| AD-40041.1 | 397 | 824 | 1251 | 1678 |
| AD-40047.1 | 398 | 825 | 1252 | 1679 |
| AD-40053.1 | 399 | 826 | 1253 | 1680 |
| AD-40059.1 | 400 | 827 | 1254 | 1681 |
| AD-40065.1 | 401 | 828 | 1255 | 1682 |
| AD-40071.1 | 402 | 829 | 1256 | 1683 |
| AD-40077.1 | 403 | 830 | 1257 | 1684 |
| AD-40083.1 | 404 | 831 | 1258 | 1685 |
| AD-40042.1 | 405 | 832 | 1259 | 1686 |
| AD-40048.1 | 406 | 833 | 1260 | 1687 |
| AD-40054.1 | 407 | 834 | 1261 | 1688 |
| AD-40060.1 | 408 | 835 | 1262 | 1689 |
| AD-40066.1 | 409 | 836 | 1263 | 1690 |
| AD-40072.1 | 410 | 837 | 1264 | 1691 |
| AD-40078.1 | 411 | 838 | 1265 | 1692 |
| AD-40084.1 | 412 | 839 | 1266 | 1693 |
| AD-40043.1 | 413 | 840 | 1267 | 1694 |
| AD-40049.1 | 414 | 841 | 1268 | 1695 |
| AD-40055.1 | 415 | 842 | 1269 | 1696 |
| AD-40061.1 | 416 | 843 | 1270 | 1697 |
| AD-40067.1 | 417 | 844 | 1271 | 1698 |
| AD-40073.1 | 418 | 845 | 1272 | 1699 |
| AD-40079.1 | 419 | 846 | 1273 | 1700 |
| AD-40085.1 | 420 | 847 | 1274 | 1701 |
| AD-40044.1 | 421 | 848 | 1275 | 1702 |
| AD-40050.1 | 422 | 849 | 1276 | 1703 |
| AD-40056.1 | 423 | 850 | 1277 | 1704 |
| AD-40062.1 | 424 | 851 | 1278 | 1705 |
| AD-40068.1 | 425 | 852 | 1279 | 1706 |
| AD-40074.1 | 426 | 853 | 1280 | 1707 |
| AD-40080.1 | 427 | 854 | 1281 | 1708 |
| AD-39720.1 | 1716 | 1754 | 1792 | 1830 |
| AD-39706.1 | 1717 | 1755 | 1793 | 1831 |
| AD-39712.1 | 1718 | 1756 | 1794 | 1832 |
| AD-39760.1 | 1719 | 1757 | 1795 | 1833 |
| AD-39732.1 | 1720 | 1758 | 1796 | 1834 |
| AD-35541.4 | 1721 | 1759 | 1797 | 1835 |
| AD-39735.1 or | 1722 | 1760 | 1798 | 1836 |
| hs_KRAS_321_A22S26 | | | | |
| AD-39741.1 or | 1723 | 1761 | 1799 | 1837 |
| hs_KRAS_322_A22S26 | | | | |
| AD-39778.1 | 1724 | 1762 | 1800 | 1838 |
| AD-39790.1 | 1725 | 1763 | 1801 | 1839 |
| AD-39822.1 | 1726 | 1764 | 1802 | 1840 |
| AD-35609.4 | 1727 | 1765 | 1803 | 1841 |
| AD-35581.4 | 1728 | 1766 | 1804 | 1842 |
| AD-39845.1 | 1729 | 1767 | 1805 | 1843 |
| AD-39858.1 | 1730 | 1768 | 1806 | 1844 |
| AD-39870.1 | 1731 | 1769 | 1807 | 1845 |
| AD-35576.4 | 1732 | 1770 | 1808 | 1846 |
| AD-35588.4 | 1733 | 1771 | 1809 | 1847 |
| AD-35600.1 | 1734 | 1772 | 1810 | 1848 |
| AD-35606.1 | 1735 | 1773 | 1811 | 1849 |
| AD-38151.1 | 1736 | 1774 | 1812 | 1850 |
| AD-38163.1 | 1737 | 1775 | 1813 | 1851 |
| AD-39999.1 | 1738 | 1776 | 1814 | 1852 |
| AD-38159.1 or | 1739 | 1777 | 1815 | 1853 |
| hs_KRAS_528_A22S26 | | | | |
| AD-38130.1 or | 1740 | 1778 | 1816 | 1854 |
| hs_KRAS_531_A22S26 | | | | |
| AD-38136.1 | 1741 | 1779 | 1817 | 1855 |
| AD-40036.1 | 1742 | 1780 | 1818 | 1856 |
| AD-40008.1 | 1743 | 1781 | 1819 | 1857 |
| AD-40021.1 | 1744 | 1782 | 1820 | 1858 |
| AD-40077.1 | 1745 | 1783 | 1821 | 1859 |
| AD-40072.1 | 1746 | 1784 | 1822 | 1860 |
| AD-40061.1 | 1747 | 1785 | 1823 | 1861 |
| AD-40068.1 | 1748 | 1786 | 1824 | 1862 |
| AD-38131.1 | 1749 | 1787 | 1825 | 1863 |
| AD-38167.1 | 1750 | 1788 | 1826 | 1864 |
| KRAS1273 31273_A22S26 | 1751 | 1789 | 1827 | 1865 |
| KRAS2892 2892_A37S26 | 1752 | 1790 | 1828 | 1866 |
| KRAS4731 4731_A22S26 | 1753 | 1791 | 1829 | 1867 |
| AD-39741.1 | 2770 | 2760 | | |
| AD-39735.1 | 2771 | 2761 | | |
| AD-38159.1 | 2772 | 2762 | | |
| NA | 2773 | 2763 | | |
| AD-38130.1 | 2774 | 2764 | | |
| NA | 2775 | 2765 | | |
| NA | 2776 | 2766 | | |
| AD-38136.1 | 2777 | 2767 | | |
| AD-40061.1 | 2778 | 2768 | | |
| AD-35588.4 | 2779 | 2769 | | |
| AD-39845.1 | 2790 | 2780 | | |
| AD-39720.1 | 2791 | 2781 | | |
| AD-35581.4 | 2792 | 2782 | | |
| AD-40068.1 | 2793 | 2783 | | |
| AD-39778.1 | 2794 | 2784 | | |
| AD-35606.1 | 2795 | 2785 | | |
| AD-35609.4 | 2796 | 2786 | | |
| AD-38163.1 | 2797 | 2787 | | |
| AD-35600.1 | 2798 | 2788 | | |
| AD-40008.1 | 2799 | 2789 | | |
| AD-40036.1 | 2810 | 2800 | | |
| AD-39790.1 | 2811 | 2801 | | |
| AD-39870.1 | 2812 | 2802 | | |
| AD-38131.1 | 2813 | 2803 | | |
| AD-40077.1 | 2814 | 2804 | | |
| AD-38167.1 | 2815 | 2805 | | |
| AD-38151.1 | 2816 | 2806 | | |
| AD-39858.1 | 2817 | 2807 | | |
| AD-39706.1 | 2818 | 2808 | | |
| AD-40021.1 | 2819 | 2809 | | |
| AD-39760.1 | 2828 | 2820 | | |
| AD-39822.1 | 2829 | 2821 | | |
| AD-39999.1 | 2830 | 2822 | | |
| AD-40072.1 | 2831 | 2823 | | |
| AD-39732.1 | 2832 | 2824 | | |
| AD-35576.4 | 2833 | 2825 | | |
| AD-39712.1 | 2834 | 2826 | | |
| AD-35541.4 | 2835 | 2827 | | |

NA, not applicable.

[0029] Table 1 presents the SEQ ID identifiers of an example unmodified first and second strand of each KRAS RNAi agent; the Table also provides an example modified sequence for each KRAS RNAi agent. For example, in Table 1, the unmodified sequences of example KRAS RNAi agent nicknamed AD-35523.3 are SEQ ID NOs: 1 and 428. An example set of modified sequences for this duplex is represented by SEQ ID NOs: 855 and 1282. Also note that the “AD” prefix of the nickname is on occasion replaced by “ND”. The name of the RNAi also sometimes has a suffix, such as 0.1. This indicates a particular variant of a duplex. Thus, AD-35523.1, AD-35523.2, AD-35523.3, ND-35523 and the like all indicate KRAS RNAi agents of the same sequence, although they may differ in how they are modified. In these cases, replacement of a U with a T is considered a modification that does not introduce a mismatch; thus, two otherwise identical sequences wherein one or more U bases are replaced by T are still considered to be identical and the same. Some nicknames of RNAi agents also comprise the suffix “bi”, indicating “batch 1.” The various KRAS RNAi agents comprising the nickname AD-35523 thus all have the same base sequence (though not necessarily the same modification), and the suffix “bi” (or “b2” or the like) may indicate a particular batch, though these also have the same sequence.

[0030] Some RNAi agents in Table 1 have alternative names or nicknames. Some nicknames are derived from their position in the KRAS gene and, often, a code for the format for modifications. It is noted, however, that different methodologies are available for numbering the KRAS gene sequence. The numbering used herein for the KRAS gene is for illustration only. Alternative names of some duplexes are listed below:

TABLE 1.1
Alternative Names of some RNAi Agents

| Duplex Name | Nickname |
|---|---|
| AD-39741.1 | hs_KRAS_322_A22S26 |
| AD-38159.1 | hs_KRAS_528_A22S26 |
| AD-39735.1 | hs_KRAS_321_A22S26 |
| AD-38130.1 | hs_KRAS_531_A22S26 |

[0031] Additional alternative names are provided in Tables 1, 2 and 3. For example, hs_KRAS 1273_A22S26 hs_KRAS 2892_A37S26, and hs_KRAS 4731_A22S26 are also sometimes alternatively designated KRAS1273, KRAS2892, and KRAS4731, respectively.

TABLE 1.2
Additional Alternative Names of some RNAi Agents. Additional siRNAs disclosed herein
also have alternative names. These names begin with AD. These alternative names,
nicknames and sequences of the generic (unmodified) sequences are provided below. The
target sequence (DNA) corresponding to the Guide and Sense strand are provided.
siRNAs include, for example, double-stranded RNA corresponding to the DNA sequences
provided (e.g., as RNA with or without any of the following or combination of any of
the following: modification(s), terminal TT or other overhang(s), endcap(s),
alternative base (LNA, PNA, etc.), and/or a few DNA bases interspersed among the RNA
or other bases, etc.).

| | | | SEQ | | SEQ |
|---|---|---|---|---|---|
| AD nick- | Nickname | | ID | | ID |
| name | siRNA | Guide 19 mer generic | NO. | Sense 19 mer generic | NO. |
| AD-39741.1 | hs KRAS | ATCAATTACTACTTGCTTC | 2760 | GAAGCAAGTAGTAATTGAT | 2770 |
| | 322 A22S26 | | | | |
| AD-39735.1 | hs KS | TCAATTACTACTTGCTTCC | 2761 | GGAAGCAAGTAGTAATTGA | 2771 |
| | 321 A22S26 | | | | |
| AD-38159.1 | hs KRAS | TTTCCTACTAGGACCATAG | 2762 | CTATGGTCCTAGTAGGAAA | 2772 |
| | 528 A22S26 | | | | |
| NA | hs KRAS | TAACTTTACATTCATCAGG | 2763 | CCTGATGAATGTAAAGTTA | 2773 |
| | 1273 | | | | |
| | A22S26 | | | | |
| AD-38130.1 | hs KS | TTATTTCCTACTAGGACCA | 2764 | TGGTCCTAGTAGGAAATAA | 2774 |
| | 531 A22S26 | | | | |
| NA | hs KRAS | AATCTAGTTATGACTATTC | 2765 | GAATAGTCATAACTAGATT | 2775 |
| | 4731 | | | | |
| | A22S26 | | | | |
| NA | hs KRAS | TATCTTTATTAAATTCTCC | 2766 | GGAGAATTTAATAAAGATA | 2776 |
| | 2892 | | | | |
| | A37S26 | | | | |
| AD-38136.1 | NA | TTTATTTCCTACTAGGACC | 2767 | GGTCCTAGTAGGAAATAAA | 2777 |
| AD-40061.1 | NA | AATTCCATAACTTCTTGCT | 2768 | AGCAAGAAGTTATGGAATT | 2778 |
| AD-35588.4 | NA | TCTATAATGGTGAATATCT | 2769 | AGATATTCACCATTATAGA | 2779 |
| AD-39845.1 | NA | GATTTAGTATTATTTATGG | 2780 | CCATAAATAATACTAAATC | 2790 |
| AD-39720.1 | NA | AGCTCCAACTACCACAAGT | 2781 | ACTTGTGGTAGTTGGAGCT | 2791 |
| AD-35581.4 | NA | TTATTTATGGCAAATACAC | 2782 | GTGTATTTGCCATAAATAA | 2792 |
| AD-40068.1 | NA | AATAAAAGGAATTCCATAA | 2783 | TTATGGAATTCCTTTTATT | 2793 |
| AD-39778.1 | NA | TTCTCCATCAATTACTACT | 2784 | AGTAGTAATTGATGGAGAA | 2794 |
| AD-35606.1 | NA | TTCTCTATAATGGTGAATA | 2785 | TATTCACCATTATAGAGAA | 2795 |
| AD-35609.4 | NA | AAATACACAAAGAAAGCCC | 2786 | GGGCTTTCTTTGTGTATTT | 2796 |
| AD-38163.1 | NA | TTTAATTTGTTCTCTATAA | 2787 | TTATAGAGAACAAATTAAA | 2797 |
| AD-35600.1 | NA | TCTCTATAATGGTGAATAT | 2788 | ATATTCACCATTATAGAGA | 2798 |
| AD-40008.1 | NA | TCTAGAAGGCAAATCACAT | 2789 | ATGTGATTTGCCTTCTAGA | 2799 |
| AD-40036.1 | NA | AATCACATTTATTTCCTAC | 2800 | GTAGGAAATAAATGTGATT | 2810 |
| AD-39790.1 | NA | GTTTCTCCATCAATTACTA | 2801 | TAGTAATTGATGGAGAAAC | 2811 |
| AD-39870.1 | hs KRAS | ATATCTTCAAATGATTTAG | 2802 | CTAAATCATTTGAAGATAT | 2812 |
| | 459 A37S26 | | | | |
| AD-38131.1 | NA | TTTCAATAAAAGGAATTCC | 2803 | GGAATTCCTTTTATTGAAA | 2813 |
| AD-40077.1 | NA | CTTGCTAAGTCCTGAGCCT | 2804 | AGGCTCAGGACTTAGCAAG | 2814 |
| AD-38167.1 | NA | CTGATGTTTCAATAAAAGG | 2805 | CCTTTTATTGAAACATCAG | 2815 |
| AD-38151.1 | NA | TAATTTGTTCTCTATAATG | 2806 | CATTATAGAGAACAAATTA | 2816 |
| AD-39858.1 | NA | ATCTTCAAATGATTTAGTA | 2807 | TACTAAATCATTTGAAGAT | 2817 |
| AD-39706.1 | NA | ATCGTCAAGGCACTCTTGC | 2808 | GCAAGAGTGCCTTGACGAT | 2818 |
| AD-40021.1 | NA | TGTCTACTGTTCTAGAAGG | 2809 | CCTTCTAGAACAGTAGACA | 2819 |
| AD-39760.1 | NA | ATTAGCTGTATCGTCAAGG | 2820 | CCTTGACGATACAGCTAAT | 2828 |
| AD-39822.1 | NA | TCGAGAATATCCAAGAGAC | 2821 | GTCTCTTGGATATTCTCGA | 2829 |
| AD-39999.1 | NA | TCTTCAGAGTCCTTAACTC | 2822 | GAGTTAAGGACTCTGAAGA | 2830 |
| AD-40072.1 | NA | ATAACTTCTTGCTAAGTCC | 2823 | GGACTTAGCAAGAAGTTAT | 2831 |
| AD-39732.1 | NA | AATGATTCTGAATTAGCTG | 2824 | CAGCTAATTCAGAATCATT | 2832 |
| AD-35576.4 | NA | TATAATGGTGAATATCTTC | 2825 | GAAGATATTCACCATTATA | 2833 |
| AD-39712.1 | NA | TATCGTCAAGGCACTCTTG | 2826 | CAAGAGTGCCTTGACGATA | 2834 |
| AD-35541.4 | NA | TATTGTTGGATCATATTCG | 2827 | CGAATATGATCCAACAATA | 2835 |

Additional tables (e.g., Tables 1.1 and 1.2) are continuations of Table 1; thus, references to any Table or Tables include references to additional Tables. For example, references to Table 1 also include references to Tables 1.1 and 1.2; and references to Tables 1 to 6 include Tables 1. 1, 1.2, 6.1, 6.2, etc.

### Various Embodiments of the Present Disclosure

[0032] Various RNAi agents to KRAS are disclosed in Tables 1 to 6.

[0033] Tables 1, 2 and 3 provide the sequence, SEQ ID NOs and relative positions of various RNAi agents to KRAS, including both unmodified sequences (listed in Table 2) and example modified sequences (listed in Table 3).

[0034] In the sequences in Table 3, lower-case letters (e.g., c, u) indicate modified nucleotides while upper case letters (e.g., C, U, A, G) indicate unmodified nucleotides. In this Table, example modified versions of each of the sequences are shown. However, the present disclosure also contemplates and encompasses unmodified versions of these sequences and other versions which comprise additional or alternative modifications. Thus, for example, AD-35523.3 can optionally have the unmodified sequences of SEQ ID NO: 1 in the sense strand and SEQ ID NO: 428 in the anti-sense strand. The present disclosure also encompasses alternative modified versions of the duplex comprising the modified sequences of SEQ ID NO: 855 in the sense strand and SEQ ID NO: 1282 in the anti-sense strand. The present disclosure also encompasses different modified variants of SEQ ID NO: 1 in the sense strand and SEQ ID NO: 428 in the anti-sense strand. Similarly, the present disclosure also encompasses any modified variant of any unmodified sequence disclosed herein.

[0035] In the sequences in Tables 1 to 3, the modified and unmodified sequences can optionally comprise the sequence “TT”, “dTdT”, “dTsdT” or “UU” at the 3′ end. Thus, in the example above, AD-35523.3 can optionally have the modified sequences of SEQ ID NO: 855 in the sense strand and SEQ ID NO: 1282 in the anti-sense strand. As noted in Table 3, below, SEQ ID NO: 855 and SEQ ID NO: 1282 include a terminal dTdT. dT is 2′-deoxy-thymidine-5′-phosphate and sdT is 2′-deoxy Thymidine 5′-phosphorothioate. In the disclosed sequences, terminal dinucleotide “UU” is 2′-OMe-U 2′-OMe-U, and neither the terminal TT nor the terminal UU are in the inverted/reverse orientation. The terminal dithymidine (or UU) is not part of the KRAS target sequence, but is a modified variant of the dithymidine dinucleotide commonly placed as an overhang to protect the ends of siRNAs from nucleases (see, for example, Elbashir et al. 2001 Nature 411: 494-498; Elbashir et al. 2001 EMBO J. 20: 6877-6888; and Kraynack et al. 2006 RNA 12:163-176). A terminal dinucleotide is known from these references to enhance nuclease resistance but not contribute to target recognition. Thus, the present disclosure also encompasses any modified or any unmodified sequence disclosed herein, wherein the modified sequence comprises a terminal TT, dTdT, sdT, dTsdT, sdTsdT, sdTdT, or the like which may be in either the inverted/reverse orientation or in the same 5′ to 3′ orientation as the KRAS specific sequence in the duplex. In addition, terminology used herein referring to “the KRAS portion of a RNAi agent sequence” and the like indicate the portion of the sequence of a RNAi agent which is derived from KRAS (thus “the KRAS portion of a RNAi agent sequence” does not include, for example, a terminal dTdT, TT, UU, or the like, but does include the portion of the RNAi agent that corresponds to or is complementary to a portion of the KRAS gene sequence or mRNA sequence.

[0036] On any modified or unmodified sequence, a 3′ end cap, as is known in the art, can be used instead of or in addition to a terminal dinucleotide to stabilize the end from nuclease degradation provided that the 3′ end cap is able to both stabilize the RNAi agent (e.g., against nucleases) and not interfere excessively with siRNA activity. Thus, the present disclosure also encompasses any modified or any unmodified sequence disclosed herein, wherein the modified sequence further comprises a terminal 3′ end cap.

[0037] Table 4 provides sets of overlapping RNAi agents to KRAS.

[0038] Activity levels of various KRAS RNAi agents are provided in Tables 5 and 6.

### An RNAi Agent Comprising an Anti-Sense Strand Described Herein

[0039] In one particular specific embodiment, the present disclosure relates to a composition comprising a RNAi agent comprising an anti-sense strand, wherein the anti-sense strand comprises at least 15 contiguous nucleotides differing by 0, 1, 2, or 3 nucleotides from the anti-sense strand of a RNAi agent to KRAS selected from those anti-sense strands in the specific duplexes provided herein and as listed, e.g., in Tables 1 to 6.

[0040] Various specific embodiments of this embodiment are described below.

[0041] In one embodiment, the composition further comprises a second RNAi agent to KRAS. In various embodiments, the second RNAi agent is physically separate from the first, or the two KRAS RNAi agents are physically connected (e.g., covalently linked or otherwise conjugated) or combined in the same pharmaceutical composition, or are both elements in the same treatment regimen.

[0042] In one embodiment, the composition comprises a RNAi agent comprising a first and an second strand, wherein the sequence of the first strand and the sequence of the second strand are the sequences of the first and second strand, respectively, of any RNAi agent provided herein. In one embodiment, the composition comprises a RNAi agent comprising a first and an second strand, wherein the sequence of the first strand and the sequence of the second strand are the sequences of the first and second strand, respectively, of any RNAi agent provided herein, further comprising an additional about 6 to 20 nucleotides on one or both strands (e.g., about 6, 7, 8, 9, 10, 11, 12, 13, 14, 15, 16, 17, 18, 19 or 20 nt). In various embodiments, the first and second strands are the sense and anti-sense strands listed in the Tables herein, respectively. In various embodiments, the first and second strands are the anti-sense and sense strands listed in the Tables herein, respectively.

[0043] In one embodiment, the antisense strand is about 30 or fewer nt in length.

[0044] In one embodiment, the sense strand and the antisense strand form a duplex region of about 15 to about 30 nucleotide pairs in length.

[0045] In one embodiment, the antisense strand is about 15 to about 36 nt in length, including about 18 to about 30 nt in length, and further including about 19 to about 21 nt in length and about 19 to about 23 nt in length. In one embodiment, the antisense strand has at least the length selected from about 15 nt, about 16 nt, about 17 nt, about 18 nt, about 19 nt, about 20 nt, about 21 nt, about 22 nt, about 23 nt, about 24 nt, about 25 nt, about 26 nt, about 27 nt, about 28 nt, about 29 nt and about 30 nt.

[0046] In one embodiment, the RNAi agent comprises a modification that causes the RNAi agent to have increased stability in a biological sample or environment, e.g., cytoplasm, interstitial fluids, blood serum, lung or intestinal lavage fluid.

[0047] In one embodiment, the RNAi agent comprises at least one sugar backbone modification (e.g., phosphorothioate linkage) and/or at least one 2′-modified nucleotide. In one embodiment, all the pyrimidines are 2′ O-methyl-modified nucleotides.

[0048] In one embodiment, the RNAi agent comprises: at least one 5′-uridine-adenine-3′ (5′-ua-3′) dinucleotide, wherein the uridine is a 2′-modified nucleotide; and/or at least one 5′-uridine-guanine-3′ (5′-ug-3′) dinucleotide, wherein the 5′-uridine is a 2′-modified nucleotide; and/or at least one 5′-cytidine-adenine-3′ (5′-ca-3′) dinucleotide, wherein the 5′-cytidine is a 2′-modified nucleotide; and/or at least one 5′-uridine-uridine-3′ (5′-uu-3′) dinucleotide, wherein the 5′-uridine is a 2′-modified nucleotide.

[0049] In one embodiment, the RNAi agent comprises a 2′-modification selected from the group consisting of: 2′-deoxy, 2′-deoxy-2′-fluoro, 2′-O-methyl, 2′-O-methoxyethyl (2′-O-MOE), 2′-O-aminopropyl (2′-O-AP), 2′-O-dimethylaminoethyl (2′-O-DMAOE), 2′-O-dimethylaminopropyl (2′-O-DMAP), 2′-O-dimethylaminoethyloxyethyl (2′-O-DMAEOE), and 2′-O—N-methylacetamido (2′-O-NMA). In one embodiment, all the pyrimidines are 2′ O-methyl-modified nucleotides.

[0050] In one embodiment, the RNAi agent comprises a blunt end.

[0051] In one embodiment, the RNAi agent comprises an overhang having 1 to 4 unpaired nucleotides.

[0052] In one embodiment, the RNAi agent comprises an overhang at the 3′-end of the antisense strand of the RNAi agent.

[0053] In one embodiment, the RNAi agent is ligated to one or more diagnostic compound, reporter group, cross-linking agent, nuclease-resistance conferring moiety, natural or unusual nucleobase, lipophilic molecule, cholesterol, lipid, lectin, steroid, uvaol, hecigenin, diosgenin, terpene, triterpene, sarsasapogenin, Friedelin, epifriedelanol-derivatized lithocholic acid, vitamin, carbohydrate, dextran, pullulan, chitin, chitosan, synthetic carbohydrate, oligo lactate 15-mer, natural polymer, low- or medium-molecular weight polymer, inulin, cyclodextrin, hyaluronic acid, protein, protein-binding agent, integrin-targeting molecule, polycationic, peptide, polyamine, peptide mimic, and/or transferrin.

[0054] In one embodiment, the RNAi agent is capable of inhibiting expression of KRAS by at least about 60% at a concentration of 10 nM in RKO cells in vitro.

[0055] In one embodiment, the RNAi agent is capable of inhibiting expression of KRAS by at least about 70% at a concentration of 10 nM in RKO cells in vitro.

[0056] In one embodiment, the RNAi agent is capable of inhibiting expression of KRAS by at least about 80% at a concentration of 10 nM in RKO cells in vitro.

[0057] In one embodiment, the RNAi agent is capable of inhibiting expression of KRAS by at least about 90% at a concentration of 10 nM in RKO cells in vitro.

[0058] In one embodiment, the RNAi agent has an EC50 of no more than about 0.1 nM in MiaPaca2 cells.

[0059] In one embodiment, the RNAi agent has an EC50 of no more than about 0.01 nM in MiaPaca2 cells.

[0060] In one embodiment, the RNAi agent has an EC50 of no more than about 0.001 nM in MiaPaca2 cells.

### A RNAi Agent Comprising a First and a Second Strand Described Herein

[0061] In one particular specific embodiment, the present disclosure relates to a composition comprising a RNAi agent comprising a first strand and a second strand, wherein the sequence of the first strand strand comprises at least 15 contiguous nucleotides, differing by 0, 1, 2, or 3 nucleotides from the sequence of the first strand of a RNAi agent to KRAS selected from the specific duplexes provided herein and listed, e.g., in Table 1.

[0062] In one particular specific embodiment, the present disclosure relates to a composition comprising a RNAi agent comprising a first strand and a second strand, wherein the sequence of the first strand and/or second strand comprise at least 15 contiguous nucleotides, differing by 0, 1, 2, or 3 nucleotides from the sequence of the first and/or second strand of a RNAi agent to KRAS selected from the specific duplexes provided herein and listed, e.g., in Table 1.

[0063] In one particular specific embodiment, the present disclosure relates to a composition comprising a RNAi agent comprising a first strand and a second strand, wherein the sequence of the first strand and/or second strand comprise the sequence of the first and/or second strand, respectively, of a RNAi agent to KRAS selected from the specific duplexes provided herein and listed, e.g., in Table 1.

[0064] In one particular specific embodiment, the present disclosure relates to a composition comprising a RNAi agent comprising a first strand and a second strand, wherein the sequence of the first strand and/or second strand are the sequence of the first and/or second strand, respectively, of a RNAi agent to KRAS selected from the specific duplexes provided herein and listed, e.g., in Table 1.

[0065] Various specific embodiments of these embodiments are described below.

[0066] In one embodiment, the composition further comprises a second RNAi agent to KRAS. In various embodiments, the second RNAi agent is physically separate from the first, or the two are physically connected (e.g., covalently linked or otherwise conjugated).

[0067] In one embodiment, the antisense strand is about 30 or fewer nt in length.

[0068] In one embodiment, the sense strand and the antisense strand form a duplex region of about 15 to about 30 nt pairs in length.

[0069] In one embodiment, the antisense strand is about 15 to about 36 nt in length including about 18 to about 23 nt in length, and including about 19 to about 21 nt in length and about 19 to about 23 nt in length. In one embodiment, the antisense strand has at least the length selected from about 15 nt, about 16 nt, about 17 nt, about 18 nt, about 19 nt, about 20 nt, about 21 nt, about 22 nt, about 23 nt, about 24 nt, about 25 nt, about 26 nt, about 27 nt, about 28 nt, about 29 nt and about 30 nt.

[0070] In one embodiment, the RNAi agent comprises a modification that causes the RNAi agent to have increased stability in a biological sample or environment, e.g., blood serum or intestinal lavage fluid.

[0071] In one embodiment, the RNAi agent comprises at least one sugar backbone modification (e.g., phosphorothioate linkage) and/or at least one 2′-modified nucleotide. In one embodiment, all the pyrimidines are 2′ O-methyl-modified nucleotides.

[0072] In one embodiment, the RNAi agent comprises: at least one 5′-uridine-adenine-3′ (5′-ua-3′) dinucleotide, wherein the uridine is a 2′-modified nucleotide; and/or at least one 5′-uridine-guanine-3′ (5′-ug-3′) dinucleotide, wherein the 5′-uridine is a 2′-modified nucleotide; and/or at least one 5′-cytidine-adenine-3′ (5′-ca-3′) dinucleotide, wherein the 5′-cytidine is a 2′-modified nucleotide; and/or at least one 5′-uridine-uridine-3′ (5′-uu-3′) dinucleotide, wherein the 5′-uridine is a 2′-modified nucleotide.

[0073] In one embodiment, the RNAi agent comprises a 2′-modification selected from the group consisting of: 2′-deoxy, 2′-deoxy-2′-fluoro, 2′-O-methyl, 2′-O-methoxyethyl (2′-O-MOE), 2′-O-aminopropyl (2′-O-AP), 2′-O-dimethylaminoethyl (2′-O-DMAOE), 2′-O-dimethylaminopropyl (2′-O-DMAP), 2′-O-dimethylaminoethyloxyethyl (2′-O-DMAEOE), and 2′-O—N-methylacetamido (2′-O-NMA).

[0074] In one embodiment, the RNAi agent comprises a blunt end.

[0075] In one embodiment, the RNAi agent comprises an overhang having 1 to 4 unpaired nucleotides.

[0076] In one embodiment, the RNAi agent comprises an overhang at the 3′-end of the antisense strand of the RNAi agent.

[0077] In one embodiment, the RNAi agent is ligated to one or more diagnostic compound, reporter group, cross-linking agent, nuclease-resistance conferring moiety, natural or unusual nucleobase, lipophilic molecule, cholesterol, lipid, lectin, steroid, uvaol, hecigenin, diosgenin, terpene, triterpene, sarsasapogenin, Friedelin, epifriedelanol-derivatized lithocholic acid, vitamin, carbohydrate, dextran, pullulan, chitin, chitosan, synthetic carbohydrate, oligo lactate 15-mer, natural polymer, low- or medium-molecular weight polymer, inulin, cyclodextrin, hyaluronic acid, protein, protein-binding agent, integrin-targeting molecule, polycationic, peptide, polyamine, peptide mimic, and/or transferrin.

[0078] In one embodiment, the RNAi agent is capable of inhibiting expression of KRAS by at least about 60% at a concentration of 10 nM in RKO cells in vitro.

[0079] In one embodiment, the RNAi agent is capable of inhibiting expression of KRAS by at least about 70% at a concentration of 10 nM in RKO cells in vitro.

[0080] In one embodiment, the RNAi agent is capable of inhibiting expression of KRAS by at least about 80% at a concentration of 10 nM in RKO cells in vitro.

[0081] In one embodiment, the RNAi agent is capable of inhibiting expression of KRAS by at least about 90% at a concentration of 10 nM in RKO cells in vitro.

[0082] In one embodiment, the RNAi agent has an EC50 of no more than about 0.1 nM in MiaPaca2 cells.

[0083] In one embodiment, the RNAi agent has an EC50 of no more than about 0.01 nM in MiaPaca2 cells.

[0084] In one embodiment, the RNAi agent has an EC50 of no more than about 0.001 nM in MiaPaca2 cells.

### A Method of Treatment Using a RNAi Agent Described Herein

[0085] In one particular specific embodiment, the present disclosure relates to a method of treating a KRAS-related disease in an individual, comprising the step of administering to the individual a therapeutically effective amount of a composition comprising a RNAi agent comprising at least an antisense strand, wherein the antisense strand comprises at least 15 to 19 contiguous nucleotides differing by 0, 1, 2, or 3 nucleotides from the antisense strand of a RNAi agent to KRAS selected from the specific duplexes provided herein and as listed, e.g., in Table 1.

[0086] In another embodiment, the present disclosure relates to such a method, wherein the composition comprising a RNAi agent further comprises a sense strand, wherein the sense strand comprises at least 15 contiguous nucleotides differing by 0, 1, 2, or 3 nucleotides from the sense strand of a RNAi agent to KRAS selected from the specific duplexes provided herein and as listed, e.g., in Table 1.

[0087] In one embodiment of the method, the RNAi agent comprises at least an anti-sense strand, and/or comprises a sense and an anti-sense strand, wherein the sequence of the sense and/or anti-sense strand is the sequence of the sense and/or the anti-sense strand of a RNAi agent to KRAS selected from those specific duplex provided herein and as listed, e.g., in Table 1, wherein the composition further comprises a pharmaceutically effective formulation.

[0088] In one embodiment of the method, the RNAi agent comprises at least an anti-sense strand, and/or comprises a sense and an anti-sense strand, wherein the sequence of the sense and/or anti-sense strand comprises the sequence of the sense and/or the anti-sense strand of a RNAi agent to KRAS selected from those specific duplex provided herein and as listed, e.g., in Table 1, wherein the composition further comprises a pharmaceutically effective formulation.

[0089] Various particular specific embodiments of these embodiments are described below.

[0090] In one embodiment, the KRAS-related disease is a proliferative disease, or cardio-facio-cutaneous (CFC) syndrome or Noonan syndrome.

[0091] In one embodiment, the KRAS-related disease is a proliferative disease, including without limitation a solid or liquid cancer, adenocarcinoma, colorectal cancer, advanced and/or metastatic colorectal cancer, colon cancer, lung, non-small cell lung cancer and lung adenocarcinoma, acute myelogenous lung, bladder, brain, breast, cervical, endometrial, gastric, head and neck, kidney, leukemia, myelodysplastic syndrome, myeloid leukemia, liver, melanoma, ovarian, pancreatic, prostate, testicular, thyroid cancers, or cardio-facio-cutaneous (CFC) syndrome or Noonan syndrome.

[0092] In one embodiment, the method further comprises the administration of an additional treatment. In one embodiment, the additional treatment is a therapeutically effective amount of a composition.

[0093] In one embodiment, the additional treatment is a method (or procedure).

[0094] In one embodiment, the additional treatment and the RNAi agent can be administered in any order, or can be administered simultaneously.

[0095] In one embodiment, the method further comprises the step of administering an additional treatment for a proliferative disease, cardio-facio-cutaneous (CFC) syndrome or Noonan syndrome.

[0096] In one embodiment, the method further comprises the step of administering an additional treatment or therapy selected from the list of an additional antagonist to a KRAS-related disease.

[0097] In one embodiment, the composition comprises a second RNAi agent to KRAS. In various embodiments, the second RNAi agent is physically separate from the first, or the two are physically connected (e.g., covalently linked or otherwise conjugated).

[0098] In one embodiment, the method further comprises the step of administering an additional RNAi agent which comprises at least 15 contiguous nucleotides differing by 0, 1, 2, or 3 nucleotides from the antisense strand of a RNAi agent to KRAS selected from the specific duplexes provided herein and as listed, e.g., in Table 1.

### a Method of Inhibiting the Expression of KRAS Using a RNAi Agent Described Herein

[0099] In one particular specific embodiment, the present disclosure relates to a method of inhibiting the expression of KRAS in an individual, comprising the step of administering to the individual a therapeutically effective amount of a composition comprising a RNAi agent of the present disclosure.

[0100] In one embodiment of the method, the RNAi agent comprises at least an anti-sense strand, and/or comprises a sense and an anti-sense strand, wherein the anti-sense strand comprises at least 15 contiguous nucleotides differing by 0, 1, 2, or 3 nucleotides from the anti-sense strand of a RNAi agent to KRAS selected from those specific duplex provided herein and as listed, e.g., in Table 1.

[0101] In one embodiment of the method, the RNAi agent comprises at least an anti-sense strand, and/or comprises a sense and an anti-sense strand, wherein the sequence of the sense and/or anti-sense strand is the sequence of the sense and/or the anti-sense strand of a RNAi agent to KRAS selected from those specific duplex provided herein and as listed, e.g., in Table 1, wherein the composition is in a pharmaceutically effective formulation.

[0102] In one embodiment of the method, the RNAi agent comprises at least an anti-sense strand, and/or comprises a sense and an anti-sense strand, wherein the sequence of the sense and/or anti-sense strand comprises the sequence of the sense and/or the anti-sense strand of a RNAi agent to KRAS selected from those specific duplex provided herein and as listed, e.g., in Table 1, wherein the composition is in a pharmaceutically effective formulation.

[0103] Various particular embodiments of these embodiments are described below.

[0104] In one embodiment, the individual is afflicted with or susceptible to a KRAS-related disease.

[0105] In one embodiment, the KRAS-related disease is a proliferative disease, or cardio-facio-cutaneous (CFC) syndrome or Noonan syndrome.

[0106] In one embodiment, the KRAS-related disease is a proliferative disease, including without limitation a solid or liquid cancer, e.g., adenocarcinoma, colorectal cancer, advanced and/or metastatic colorectal cancer, colon cancer, lung, non-small cell lung cancer and lung adenocarcinoma, acute myelogenous lung, bladder, brain, breast, cervical, endometrial, gastric, head and neck, kidney, leukemia, myelodysplastic syndrome, myeloid leukemia, liver, melanoma, ovarian, pancreatic, prostate, testicular, thyroid cancers, or cardio-facio-cutaneous (CFC) syndrome or Noonan syndrome.

[0107] In one embodiment, the method further comprises the administration of an additional treatment. In one embodiment, the additional treatment is a therapeutically effective amount of a composition. In one embodiment, the additional treatment is a therapeutically relevant method (or procedure).

[0108] In one embodiment, the additional treatment and the RNAi agent can be administered in any order or can be administered simultaneously.

[0109] In one embodiment, the method further comprises the step of administering an additional treatment for a proliferative disease, cardio-facio-cutaneous (CFC) syndrome or Noonan syndrome.

[0110] In one embodiment, the composition comprises a second RNAi agent to KRAS. In various embodiments, the second RNAi agent is physically separate from the first, or the two are physically connected (e.g., covalently linked or otherwise conjugated).

[0111] In one embodiment, the method further comprises the step of administering an additional RNAi agent which comprises at least 15 contiguous nucleotides differing by 0, 1, 2, or 3 nucleotides from the antisense strand of a RNAi agent to KRAS selected from the specific duplexes provided herein and as listed, e.g., in Table 1.

[0112] Pharmaceutical compositions of a RNAi agent to KRAS In one particular specific embodiment, the present disclosure relates to a composition comprising a RNAi agent of the present disclosure. In one embodiment, the RNAi agent comprises at least an anti-sense strand, and/or comprises a sense and an anti-sense strand, wherein the anti-sense strand comprises at least 15 contiguous nucleotides differing by 0, 1, 2, or 3 nucleotides from the anti-sense strand of a RNAi agent to KRAS selected from those specific duplex provided herein and as listed, e.g., in Table 1, wherein the composition is in a pharmaceutically effective formulation.

[0113] In one embodiment, the RNAi agent comprises at least an anti-sense strand, and/or comprises a sense and an anti-sense strand, wherein the sequence of the sense and/or anti-sense strand is the sequence of the sense and/or the anti-sense strand of a RNAi agent to KRAS selected from those specific duplex provided herein and as listed, e.g., in Table 1, wherein the composition is in a pharmaceutically effective formulation.

[0114] In one embodiment, the RNAi agent comprises at least an anti-sense strand, and/or comprises a sense and an anti-sense strand, wherein the sequence of the sense and/or anti-sense strand comprises the sequence of the sense and/or the anti-sense strand of a RNAi agent to KRAS selected from those specific duplex provided herein and as listed, e.g., in Table 1, wherein the composition is in a pharmaceutically effective formulation.

[0115] In one embodiment, the present disclosure pertains to the use of a RNAi agent in the manufacture of a medicament for treatment of a KRAS-related disease, wherein the RNAi agent comprises a sense strand and an antisense strand, wherein the antisense strand comprises at least 15 contiguous nucleotides differing by 0, 1, 2, or 3 nucleotides from the antisense strand of a RNAi agent to KRAS selected from those specific duplex provided herein and as listed, e.g., in Table 1.

Specific Embodiments of RNAi Agents to KRAS Comprising Mismatches from the Disclosed Sequences

[0116] Various specific embodiments of a RNAi agent to KRAS are disclosed herein. The present disclosure encompasses the example modified sequences provided in Tables 1 to 6, and the corresponding unmodified sequences and other modified sequences (e.g., modified and unmodified variants). Specific embodiments of the present disclosure include RNAi agents which comprise sequences differing by 0, 1, 2, or 3 nt (nucleotides) or bp [basepair(s)](e.g., with 0, 1, 2 or 3 mismatches) from any of the RNAi agents listed in Table 1, and modified and unmodified variants thereof. As described in additional detail below, a mismatch is defined herein as a difference between the base sequence (e.g., A instead of G) or length when two sequences are maximally aligned and compared. In addition, as described in more detail below, an “unmodified variant” is a variant in which the base sequence is identical, but none of the bases are modified; this includes, for example, a sequence identical to the corresponding portion of the wild-type KRAS mRNA or gene. A “modified variant” contains one or more modifications (or one or more fewer or different modifications) to a nucleotide, sugar, phosphate or backbone, and/or addition of one or more moieties; but without a change, substitution, addition, or deletion to the base sequence. A particular sequence and its modified or unmodified variants have 0 mismatches among them.

[0117] In one particular embodiment, the present disclosure comprises a RNAi agent comprising a sense and an anti-sense strand, wherein the sense and/or anti-sense strand comprises at least 15 contiguous nucleotides differing by 0, 1, 2, or 3 nt from the sequence of the sense and/or anti-sense strand of: any of the RNAi agents listed in Tables 1 to 6, and modified and unmodified variants thereof.

[0118] In another particular embodiment, the RNAi agent comprises a sense strand comprising at least 15 contiguous nucleotides differing by 0, 1, 2, or 3 nt from the sense strand of any of the RNAi agents listed in Tables 1 to 6, and modified and unmodified variants thereof.

### OTHER EMBODIMENTS

[0119] Various particular specific embodiments of this disclosure are described below.

[0120] In one embodiment, the disclosure pertains to a composition according to any of the embodiments described herein, for use in a method of treating a KRAS-related disease in an individual, the method comprising the step of administering to the individual a therapeutically effective amount of a composition according to any of the claims.

[0121] One embodiment of the disclosure is the use of a composition according to any of these embodiments, in the manufacture of a medicament for treatment of an KRAS-related disease.

[0122] In one embodiment, the KRAS-related disease is a proliferative disease, or cardio-facio-cutaneous (CFC) syndrome or Noonan syndrome.

[0123] In one embodiment, the KRAS-related disease is a proliferative disease, including without limitation a solid or liquid cancer, adenocarcinoma, colorectal cancer, advanced and/or metastatic colorectal cancer, colon cancer, lung, non-small cell lung cancer and lung adenocarcinoma, acute myelogenous lung, bladder, brain, breast, cervical, endometrial, gastric, head and neck, kidney, leukemia, myelodysplastic syndrome, myeloid leukemia, liver, melanoma, ovarian, pancreatic, prostate, testicular, thyroid cancers, or cardio-facio-cutaneous (CFC) syndrome or Noonan syndrome.

[0124] In one embodiment, the disclosure pertains to the composition of any of the above embodiments, for use in the treatment of an KRAS-related disease.

### Definitions

[0125] For convenience, the meaning of certain terms and phrases used in the specification, examples, and appended claims, are provided below. If there is an apparent discrepancy between the usage of a term in other parts of this specification and its definition provided in this section, the definition in this section shall prevail.

### KRAS

[0126] By “KRAS” is meant the gene, mRNA, and/or protein, or any nucleic acid encoding the protein, or any mutant, variant or modified version thereof, designated by the Approved Gene Symbol: KRAS; Cytogenetic location: 12p12.1; Genomic coordinates (GRCh37): 12:25,358,179-25,403,853 (from NCBI), which also variously designated: KRas, K-ras, K-RAS, GTPase KRas, and V-Ki-ras2 Kirsten rat sarcoma viral oncogene homolog, C-K-RAS; K-RAS2A; K-RAS2B; K-RAS4A; K-RAS4B; KI-RAS; KRAS2; RASK2; v-Ki-ras2 Kirsten rat sarcoma viral oncogene homolog [Source: MGI Symbol; Acc: MGI: 96680]; OMIM: 190070 MGI: 96680 HomoloGene: 37990 GeneCards: KRAS Gene; Species Human: Entrez 3845; Ensembl ENSG00000133703; UniProt P01116; RefSeq (mRNA) NM_004985.3; RefSeq (protein) NP_004976.2; Location (UCSC) Chr 12: 25.36-25.4 Mb; Species-Mouse: Entrez-16653; Ensembl-ENSMUSG00000030265; UniProt-070564; RefSeq (mRNA)-NM_021284.6; RefSeq (protein)-NP_067259.4; Location (UCSC)-Chr 6: 145.17-145.2 Mb.

### The Ras Subfamily

[0127] The Ras subfamily (an abbreviation of RAt Sarcoma) is a protein subfamily of small GTPases that are involved in cellular signal transduction and other processes. Activation of Ras signaling causes cell growth, differentiation and survival.

[0128] Since Ras communicates signals from outside the cell to the nucleus, mutations in ras genes can cause permanent activation and inappropriate transmission inside the cell, even in the absence of extracellular signals. Because these signals result in cell growth and division, dysregulated or otherwise aberrant Ras signaling can ultimately lead to oncogenesis and cancer. Goodsell et al. 1999. Oncologist 4. 3: 263-4. Activating mutations in Ras are found in a third of all human tumors and up to 90% in specific tumor types. Downward. 2003. Nat. Rev. Cancer 3. 1: 11-22; Bos et al. 1989 Cancer Res. 49: 4682-4689; and Forbes et al. 2006 Br. J. Cancer 94: 318-322

[0129] The ras genes were first identified as the transforming oncogenes [Malumbres et al. 2003. Nat. Rev. Cancer 3. 6: 459-65] responsible for the cancer-causing activities of the Harvey (the HRAS oncogene) and Kirsten (KRAS) sarcoma viruses, by Scolnick and colleagues at the National Institutes of Health (NIH). Chang et al. 1982. Proc. Natl. Acad. Sci. U.S.A. 79. 16: 4848-52. These viruses were discovered originally in rats during the 1960s by Jennifer Harvey [Harvey. 1964. Nature 204. 4963: 1104-5] and Werner Kirsten [Kirsten et al. 1970. Bibl Haematol. 36: 246-9], respectively. In 1982, activated and transforming human KRAS genes were discovered in human cancer cells [Santos et al. 1982. Nature 298. 5872: 343-7], [Parada et al. 1982. Nature 297. 5866: 474-8]. Subsequent studies identified a third human KRAS gene, designated NRAS, for its initial identification in human neuroblastoma cells.

[0130] The three human KRAS genes encode highly related 188 to 189 amino acid proteins, designated H-Ras, N-Ras and K-Ras4A and K-Ras4B (the two K-Ras proteins arise from alternative gene splicing). For additional information pertaining to KRAS cloning and isoforms, see, for example, Der et al. 1982 Proc. Nat. Acad. Sci. 79: 3637-3640; Chang et al. 1982 Proc. Nat. Acad. Sci. 79: 4848-4852; McCoy et al. 1983 Nature 302: 79-81; McGrath et al. 1983 Nature 304: 501-506; and Carta et al. 2006 Am. J. Hum. Genet. 79: 129-135.

### Ras Function

[0131] Ras proteins function as binary molecular switches that control intracellular signaling networks. Ras-regulated signal pathways, control such processes as actin cytoskeletal integrity, proliferation, differentiation, cell adhesion, apoptosis, and cell migration. Ras and ras-related proteins are often deregulated in cancers, leading to increased invasion and metastasis and decreased apoptosis.

[0132] Ras activates several pathways, of which the mitogen-activated protein (MAP) kinase cascade has been well-studied. This cascade transmits signals downstream and results in the transcription of genes involved in cell growth and division. There is a separate AKT pathway that inhibits apoptosis.

[0133] In various embodiments, the RNAi agents can be used to treat KRAS-related diseases in which any one or more of these pathways or functions is altered. In various embodiments, the present disclosure encompasses KRAS RNAi agents that modulate or alter Ras-regulated signal pathways, including the MAP kinase cascade, and/or modulate or alter processes such as actin cytoskeletal integrity, proliferation, differentiation, cell adhesion, apoptosis, and cell migration. Ras and ras-related proteins are often deregulated in cancers, leading to increased invasion and metastasis and decreased apoptosis.

### Activation and Deactivation

[0134] Ras is a G protein, or a guanosine-nucleotide-binding protein. Specifically, it is a single-subunit small GTPase, which is related in structure to the Ga subunit of heterotrimeric G proteins (large GTPases). G proteins function as binary signaling switches with “on” and “off” states. In the “off” state it is bound to the nucleotide guanosine diphosphate (GDP), while in the “on” state, Ras is bound to guanosine triphosphate (GTP), which has an extra phosphate group as compared to GDP. This extra phosphate holds the two switch regions in a “loaded-spring” configuration (specifically the Thr-35 and Gly-60). When released, the switch regions relax which causes a conformational change into the inactivate state. Hence, activation and deactivation of Ras and other small G proteins are controlled by cycling between the active GTP-bound and inactive GDP-bound forms.

[0135] Critical regions of KRAS for oncogenic activity include codons 12, 13, 59, 60, 61, 63 and 153. Grimmond et al. 1992 Urol. Res. 20:121-126; Burner et al. 1989 Proc. Natl. Acad. Sci. 86: 2403-2407. Mutations sometimes appear affecting these codons. Some KRAS mutations cause RAS to accumulate in the GTP-bound state by impairing intrinsic GTPase activity and conferring resistance to GTPase-activating proteins. Zenker et al. 2007 J. Med. Genet. 44: 131-135. In various embodiments, the sequence of the KRAS RNAi agent encompasses the portion of the coding segment corresponding to any of the above-listed codons. In various embodiments, the KRAS RNAi agent has a mismatch to the wild-type (wt) KRAS sequence, such that the sequence of the KRAS RNAi agent matches the sequence of a mutated portion of the KRAS gene. In various embodiments, the disclosure encompasses the administration to a patient of a KRAS RNAi agent with a sequence corresponding to that of a particular mutation found in the patient, optionally combined with the administration of a KRAS RNAi agent with a sequence encompassing the wt sequence. In some embodiments, the KRAS RNAi agents correspond to different portions of the KRAS mRNA. In some embodiments, the patient may have one or more mutations corresponding to particular codons of KRAS (e.g., codons 12, 13 and/or 59), but the remainder of the KRAS gene is wild type, and thus the patient can be administered a KRAS RNAi agent with a wild-type sequence which does not span the mutation, and/or administered a KRAS RNAi agent with a sequence corresponding to the one or more mutations.

[0136] In some embodiments, the disclosure encompasses a method involving the steps of identifying a patient with a KRAS-related disease, isolating a nucleic acid encoding or corresponding to the KRAS protein or gene from the patient, determining the sequence of the nucleic acid to determine if there is a mutation in the KRAS gene, and, if the sequence indicates a mutation in KRAS, producing a KRAS RNAi agent with a sequence which corresponds to the mutation, and administering the KRAS RNAi agent in a therapeutically effective amount to treat or ameliorate the KRAS-related disease. In some embodiments, the KRAS RNAi agent is administered along with or as part of a treatment regimen with another disease treatment appropriate to the KRAS-related disease.

[0137] The process of RAS exchanging the bound nucleotide is facilitated by guanine nucleotide exchange factors (GEFs) and GTPase activating proteins (GAPs). As per its classification, Ras has an intrinsic GTPase activity, which means that the protein on its own will hydrolyze a bound GTP molecule into GDP. However this process is too slow for efficient function, and hence the GAP for Ras, RasGAP, may bind to and stabilize the catalytic machinery of Ras, supplying additional catalytic residues (“arginine finger”) such that a water molecule is optimally positioned for nucleophilic attack on the gamma-phosphate of GTP. An inorganic phosphate is released and the Ras molecule is now bound to a GDP.

[0138] Since the GDP-bound form is “off” or “inactive” for signaling, GTPase Activating Protein inactivates Ras by activating its GTPase activity. Thus, GAPs accelerate Ras inactivation.

[0139] GEFs catalyze a “push and pull” reaction which releases GDP from Ras. They insert close to the P-loop and magnesium cation binding site and inhibit the interaction of these with the gamma phosphate anion. Acidic (negative) residues in switch II “pull” a lysine in the P-loop away from the GDP, which “pushes” switch I away from the guanine. The contacts holding GDP in place are broken and it is released into the cytoplasm. Because intracellular GTP is abundant relative to GDP (approximately 10 fold more). GTP predominantly re-enters the nucleotide binding pocket of Ras and reloads the spring. Thus GEFs facilitate Ras activation. Well known GEFs include Son of Sevenless (Sos) and cdc25 which include the RasGEF domain.

[0140] The balance between GEF and GAP activity determines the guanine nucleotide status of Ras, thereby regulating Ras activity.

[0141] In the GTP-bound conformation, Ras has high affinity for numerous effectors which allow it to carry out its functions. These include PI3K. Other small GTPases may bind adaptors such as arfaptin or second messenger systems such as adenylyl cyclase. The Ras binding domain is found in many effectors and invariably binds to one of the switch regions, because these change conformation between the active and inactive forms. However, they may also bind to the rest of the protein surface.

[0142] In various embodiments, the present disclosure encompasses KRAS RNAi agents that modulate the amount of KRAS and/or the amount of activated KRAS in a cell. In various other embodiments, the present disclosure encompasses a composition or pharmaceutical composition comprising and/or a method of treatment involving one or more KRAS RNAi agents and a second agent (e.g., another RNAi agent, antibody, or small molecule) which targets a factor which interacts with KRAS (e.g., PI3K, GAP, etc.).

### Ras in Cancer

[0143] Mutations in the Ras family of proto-oncogenes are very common. A pharmacological approach that curtails Ras activity can inhibit certain cancer types. Ras point mutations are the single most common abnormality of human proto-oncogenes. Pathologic Basis of Disease 8th ed. 2010. p. 282. Ras inhibitor trans-farnesylthiosalicylic acid (FTS, Salirasib) exhibits profound anti-oncogenic effects in many cancer cell lines. Rotblat et al. 2008. Methods Enzymol 439: 467-89; and Blum et al. 2005. Cancer Research 65. 3: 999-1006.

[0144] In various embodiments, KRAS RNAi agents disclosed herein can be introduced into tumor cells with a point mutation in KRAS or other mutation causing an over-expression or hyper-activity of KRAS. Such cells are termed “KRAS-defective” cells.

[0145] Inappropriate activation of the gene has been shown to play a key role in signal transduction, proliferation and malignant transformation. Lodish et al. 2000. Chapter 25. Cancer. Molecular cell biology. 4th ed. San Francisco: W.H. Freeman.

[0146] Mutations in a number of different genes as well as KRAS itself can also have this effect. Oncogenes such as p210BCR-ABL or the growth receptor erbB are upstream of Ras, so if they are constitutively activated their signals will transduce through Ras.

[0147] The tumour suppressor gene NF1 encodes a Ras-GAP—its mutation in neurofibromatosis will mean that Ras is less likely to be inactivated. RNAi agents targeting KRAS can thus be used in conjunction with other agents (e.g., other RNAi agents) which target other factors which effect KRAS and its various pathways.

[0148] Finally, Ras oncogenes can be activated by point mutations so that the GTPase reaction can no longer be stimulated by GAP—this increases the half life of active Ras-GTP mutants.

[0149] In various embodiments, the KRAS RNAi agent can be administered to patients having a KRAS-related diseases involving a mutation outside KRAS, such as in p210BCR-ABL, erbB, or NF1. In various other embodiments, the present disclosure encompasses a composition or pharmaceutical composition or treatment method involving both one or more KRAS RNAi agents and one or more agents (e.g., a RNAi agent, antibody or small molecule) which targets another factor which causes inappropriate activation of KRAS, such as in p210BCR-ABL, erbB, or NF1.

### Constitutively Active Ras

[0150] Constitutively active Ras (Ras^{D}) is one which contains mutations that prevent GTP hydrolysis, thus locking Ras in a permanently ‘On’ state.

[0151] The most common mutations are found at residue G12 in the P-loop and the catalytic residue Q61.

[0152] The glycine to valine mutation at residue 12 renders the GTPase domain of Ras insensitive to inactivation by GAP and thus stuck in the “on state”. Ras requires a GAP for inactivation as it is a relatively poor catalyst on its own, as opposed to other G-domain-containing proteins such as the alpha subunit of heterotrimeric G proteins.

[0153] Residue 61 is responsible for stabilizing the transition state for GTP hydrolysis. Because enzyme catalysis in general is achieved by lowering the energy barrier between substrate and product, mutation of Q61 to K necessarily reduces the rate of intrinsic Ras GTP hydrolysis to physiologically meaningless levels.

[0154] In various embodiments, the present disclosure pertains to a method of treatment of a patient having or susceptible to a KRAS-related disease, wherein the KRAS is constitutively active.

### KRAS Sequences in Various Species

[0155] The sequence of KRAS gene has determined for various species, including Human (HGNC: 6407; NM_004985.3); Mouse (MGI:96680); and Rat (RGD:2981). A RNAi agent specific to KRAS can be designed such that the sequence thereof completely matches that of the mRNA corresponding to the human KRAS gene and the homologous gene from a test animal. This is advantageous when developing a therapeutic RNAi agent since the same RNAi agent can be used in both a test animal (e.g., rat, mouse, or cynomolgus monkey, etc.) and a human.

[0156] The KRAS sequence in cynomolgus monkey (Macaca fascicularis, or “cyno”) has been partially determined. Shown below are the partial cyno sequence and comparisons between portions of the cyno and human KRAS sequences. NM_004985 KRAS, v-Ki-ras2 Kirsten rat sarcoma viral oncogene homolog consensus—target length=5312, consensus length=4474, 23 contigs (longest is 775) 113 mismatches, 1651.87410068346 reads, coverage: max=96, mean=13.158; consensus consistency=99.41%, target/consensus conservation 97.47%.

| KRAS cynomolgus sequence: | |
|---|---|
| [SEQ ID NO: 1709] | |
| NNNNNNNNNN NNNNNNNNNN NNNNNNNNNN NNNNNNNNNN NNNNNNNNNN NNNNNNNNNN | 60 |
| NNNNNNNNNN NNNNNNNNNN NNNNNNNNNN NNNNNNNNNN NNNNNNNNNN NNAGGCACTG | 120 |
| AAGGCGGCGG CGGGGCCAGA GGCTCAGCGG CTCCCCGGGG CGGGAGAGAG NNNNNNNNNN | 180 |
| NNNNNNNNNN NNNNNNNNNN NNNNAGTTGG AGCTGGTGGG GTAGGCAAGA GTGCCTTGAC | 240 |
| NNNNNNGCTA ATTCAGAATC ATTTTGTGGA CGAATATGAT CCAACAATAG AGGATTCCTA | 300 |
| CAGGAAGCAA GTAGTAATTG ATGGAGAAAC CTGTCTCTTG GATATTCTCG ACACAGCAGG | 360 |
| TCAAGAGGAG TACAGTGCAA TGAGGGACCA GTACATGAGG ACTGGGGAGG GCTTTCTTTG | 420 |
| TGTATTTGCC ATAAATAATA CTAAATCATT TGAAGATATT CACCATTATA GAGAACAAAT | 480 |
| TAAAAGAGTT AAGGACTCTG AAGATGTACC TATGGTCCTA GTAGGAAATA AATGTGATTT | 540 |
| GCCTTCTAGA ACAGTAGACA CAAAACAGGC TCAGGACTTA GCAAGAAGTT ACGGAATTCC | 600 |
| TTTTATTGAA ACATCAGCAA AGACAAGACA GGGTGTTGAT GATGCCTTCT ATACATTAGT | 660 |
| TCGAGAAATT CGAAAACATA AAGAAAAGAT GAGCAAAGAT GGTAAAAAGA AGAAAAAGAA | 720 |
| GTCAAAGACA AAGTGTGTAA TTATGTAAAT ACAATTTGTA CTTTTTTCTT AAGGCATACT | 780 |
| AGTAAAAGTG GTAATTTTTG TACATTACAC TAAATTATTA GCATTTGTTT TAGCATTACC | 840 |
| TAATTTTTTT CCTGCTCCAT GCAGACTGTT AGCTTTTACC TTAAATGCTT ATTTTAAAAT | 900 |
| GACAGTGGAA GCTTTTTTTT CCTCTAAGTG CCAGTATTCC CAGAGTTTTG ATTTTTGAAC | 960 |
| TAGCAATGCC TGTGAAAAAG AAACTGAATA CCTAAGATTT CTGTCTTGGG GTTTTTGGTG | 1020 |
| CNNNNNNNNN NNNNNNNNNN NNNNNNNNNN NNNNNNNNNN NNNNNNNNNN NNNNNNAATT | 1080 |
| AATGAAGCTT CTGAATCATC CCTATTCTGT GTTTTATCTA GTCACATAAA TGGATTAATT | 1140 |
| ACTAATTTCA GTTGAGACCT TCTAATTGGT TTTTACTGAA ACATTGAGGG AACACAAANN | 1200 |
| NNNNNNNNNN NNNNNNNNNN NNNNTCTAGG CATCATGTCC TATAGTTTGT CATCCCTGAT | 1260 |
| GAATGTAAAG TTACACTGTT CACAAAGGTT TTGTTCCCTT TCCACTGCTA TTAGTCATGG | 1320 |
| TCACTCTCCC CGNNNNNNNN NNNNNNNNNN NNNNNNNNNN NNNNNTGGAA AAAAATTACA | 1380 |
| AGTCAATGGA AACTATTATA AGGCCGTTTC CTTTTCACAT TAGATAAATT ACTATAAAGA | 1440 |
| CTCCTAATAG CTTTTCCTGT TAAGGCAGAC CCAGTATGAA ATGGGGATTN NNNNNNNNNN | 1500 |
| NNNNNNNNNN NNNNNNNNNN NNNNNNNNNA ATTTTTATAA TAATTGAAAT AATTTTAACA | 1560 |
| TGTATAAAAA ATTCTCATAG GAATTAAATG TAGTCTCCCT GTGTCAGATT GCTCTTTCAT | 1620 |
| AGTATAACTT TAAATCTTTT CTTCAACTTC AGTCTTTGAA GGTAGTTTTA ATTCTGCTTG | 1680 |
| TGACATTAAA AGATTATTTG GGCCAGTTAT AGCTTAGTAG GTGTTGAAGA GACCAAGGTT | 1740 |
| GCATGGCCAG GCCCTGTGTG AACCTTTGAG CTTTCATAGA GAGTTTCACA GCATGGACTG | 1800 |
| TGTCCCCATG GTCATCCAGT GTTGTCATGC ATTGGTTAGT CAAAATGGGG AGGGACTAGG | 1860 |
| ACAGTTTGGA TAGGTCAACA AGATACATTC TCACTCTGTG GTGGTCCTGC TGACAAATCA | 1920 |
| AGAGCATTGC TTTTGTTTTT TAAGAAAATG AACTCTTTTT TAAAAATTAC TTTTAAATAT | 1980 |
| TAACTCAAAA GTTGAGATTT TGGGGGGGTG GTATGCCAAG ACATTAATTT TTTTNNNNNN | 2040 |
| NNNNNNNNNN NNNAAGTTTT ACAATCTCTA GGTTTGGCTA GTTCTCTTAA CACTGGTTAA | 2100 |
| ATTAACATTT CATAAACACT TTTCAAGNNN NNNNNNNNNN NNNNNNNNNN NNNNNNNNNN | 2160 |
| NNNNNNNNNN NNNNNNNNNN NNNATTTAAA ATGTTACTTA TTTTAAAATA TATGAAATGA | 2220 |
| GATGGCATGG TGAGGTGAAA GTATCACTGG ACTANNAAGA AGGTGACTTA GGTTCTAGAT | 2280 |
| AGTTGTCTTT TAGGACTCTG ATTTTGAGGA CATCACTTAC TATCCATTTC TTCATGTTAA | 2340 |
| NNNNNNNNNN NNNNNNNNNN NNNNNNNNNN TTTTTACAAC TATGTGATTT ATATTCCGTT | 2400 |
| TACATGAGGA TACACTTATT TGTCAAGCTC AGCACAATCT AAAAATTTTT AACCTATGTT | 2460 |
| ACACCATCTT CAGTGCCAAT CTTGGGCAAA ATTGTGCAAG AGGTGAAGTT TATATTTGAA | 2520 |
| TATCCATTCT CGTTTTAGGA CTCTCCTTCC ATGTTAGTGT CATCTTGCCT GCCTACCTTC | 2580 |
| CACATGCCCC ATGACTTGAT GCAGTTTTAA TACTTCTAAT TCCCCTAACC ATAAGATTTA | 2640 |
| CTGCTGCTAT GGATATCTCC ATGAAGTTTT CCCNNNNNNN NNNNNNNNNN NNNNNNNNNN | 2700 |
| NNNNNNNNNN NNNNNNNNNN NGAGAATCTG ACAGATACCA TAATGGGATT TGACCTAATC | 2760 |
| ACTAATTTTC AGGTGGTGGC CGATCCTTTG AAAATATCTC TGCTGCCCAA TCCATTAGCG | 2820 |
| ACAGTAGGAT TTTTCAGACC TGGTATGAAT AGACAGAACC CTATCCAGTG GAAGGAGAAT | 2880 |
| TTAATAAAGA TAGTACTGAA ATAATTCCTA AGGTAATCTA CAACTAGGAC TACTCCTGGT | 2940 |
| AACAGTAATA CATTCCATTG TTTTAGTAAC CAGAAATNNN NNNNNNNNNN NNNNNNNNNN | 3000 |
| NNNNNNNNNN NNNNNNNNNN NNNNNNNNNN NNNNNNNNNN NNNNNNNNNN NNCCAGGCTG | 3060 |
| GAATGCAGTG GCGCCATCTC AGCTCACTGC AACCTCCATC TCCCAGGTTC AAGCGATTCT | 3120 |
| CGTGCCTCGG CATCCTGAGT AGCTGGGATT ACAGGCATGT GCCNCCACAC TCAACTAATT | 3180 |
| TTTGTAGTTT TAGGAGAGAC AGGGTTTCAC CCTATTGGCC AGGCTGGTCT CGAACTCCTG | 3240 |
| ACCTCAAGTG ATTCACCCAC CTNNNCCTCA TAAAGCCGTT TTGCAGAACT CATTTATTCA | 3300 |
| GCAAATATTT ATTGAGTGCC TACCAGATGC CAGTCATTTC ACAAGGCACT GGGTATATGG | 3360 |
| TATCCCCAAA CAAGAGACAT AATCCTGGTC CTTAGCTAGT GCTAGCNNNN NNNNNNNNNN | 3420 |
| NNNNNNNNNN NNNNNNNNNN NNNNNNNNNN NNNNNNNNNN NNNNNNNNNN NNNNNNNNNN | 3480 |
| NNNNGGGGTT TGGTCCCTGT GCCTGCTCTA TAATTGTTTT GCTATGATTC CAGTGAAANN | 3540 |
| NNNNNNNNNN NNNNNNNNNN NNNNNNNNNN NNNNNNNNNN NNNNNNNNNN NNNNNNNNNN | 3600 |
| NNNNNNNNNN NNNNNNNNNN NNNNNNNNNN NNNNNNNNNN NNTTACTGTA CACATTAAGG | 3660 |
| TGTATGTCAG ATATCCATAT TGAANNNNNN NNNNNNNNNN NNNNNNNNNN NNNNNNNNAT | 3720 |
| AATTAAAATA TACTTAAAAA TTAATAGTTT TATCTGGGTA CAAACAAACA GGTGCCTGAA | 3780 |
| CTAGTTCACA GACAAGGAAA CTTCTATGTA AAAATCAGTA TGATTTNNNN NNNNNNNNGT | 3840 |
| GAAACTACAG ATCTTTGGAA CATTGTTTAG ATAGGGTGTT AAGACTTACA CAGTACCACG | 3900 |
| TTTCTACACA CAGAAAGAAA TGGCCATACT TCAGGAACTG CAGTGCTAAT GAGGGGATAT | 3960 |
| TTAGGCCTCT TGAATTTTTG ATGTAGATGG GCATTTTTTT AAGGTANNTG GTAATTACCT | 4020 |
| TTATGTGAAC TTTGAATGGT TTAACAAAAG ATTTGTTTTT GTAGAGATTT TAAAGGGGGA | 4080 |
| GAATGCTAGA AATAAATGTT ATCTAANNNN NNNCGCCTTA AAGATAAAAA TCCTTGTTGA | 4140 |
| AGTTTTTTAA AAAAAAGCTA AATTACATAG TCTTAGGCAT TAACATGTTT GTGGAAGAAT | 4200 |
| ATAGCACACA TATATTGTAT CATTTGAGTG AATATTCCCA AATAGGCATT CTAGGCTCTA | 4260 |
| TTTAACTGAG TCACACTGCA TAGGAATTTA GAACCTAACT TTTATAGGTT ATCAAAACTG | 4320 |
| TTGCCTCCAT TGCACAATTT TGTCCTAATA CATACATGGA GACTTTGTGG GGCATGTTAA | 4380 |
| GTTACAGTTT GCACAAGTTC ATCTCATTTG TATTCCATTG ATTTTTTTTT TCTTCTAAAC | 4440 |
| ATTTTTTCTT CAAACAGTAT ATAACTTTTT TTAGGGGATT TTTTTTNNNN NNNNNNNNNN | 4500 |
| NNTCTGACGA TTTCCATTTG TCAAAAAGTA ATGATTTCTT GATAATTATG TAGTAATGTT | 4560 |
| TTTAAGAACC CAGCAGTTAC CTTAAAGCTG AATTTATATT TAATAACTTC TGTGTTAATA | 4620 |
| CTGGATAGCA TGAATTCTGC ATTGAGAAAC TGAATAGNNN NNNNNNNNNN NNNNNNNNNN | 4680 |
| NNNNNNNNNN NNNNNNNNCA TGAGTTCTTG AAGAATAGTC ATAACTAGAT TAAGATCTGT | 4740 |
| GTTTTAGTTT AATAGTTTGA AGTGCCTGTT TGGGATAATG ATAGGTAATT TAGATGAATT | 4800 |
| TAGGGGGAAA AAAAGTTATC TGCAGAAATG TTGAGGGCCC ATCTCTCCCC ACACACCCAC | 4860 |
| ATAGAGCTAA CTGGGTTACA GTGTTTTATC CGAAAGTTTC CAATTCCACT GTCTTGTGTT | 4920 |
| TTCATGTTGA AAATACTTTT GCATTTTTCC TTTGAGTGCC AATTTCTTAC TAGTACTATT | 4980 |
| TCTTAATGTA ACATGTTTAC CTGGAATGTA TTTTAACTAT TTTTGTATAG TGTAAACTGA | 5040 |
| AACATGCACA TTTTGTACAT TGTGCTTTCT TTTGTGGGAC ATATGCAGTG TGATCCAGTT | 5100 |
| GTTTTCCATC ATTTGGTTGC GCTGACCTAG GAATGTTGGT CATATCAAAC ATTAAAAATG | 5160 |
| ACCACTCTTT TAATTGAAAT TAACTTTTAA ATGTTTATAG GAGTATGTGC TGTGAAGTGA | 5220 |
| TCTAAAATTT GTAATATTTT TGTCATGAAC TGTACTACTC CTAATTATTG TAATGTAATA | 5280 |
| AAAATAGTTA CAGTGACAAA AAAAAAAAAN NN. | 5312 |

[0157] Comparisons between portions of the human sequence and the cyno sequence are presented below.

| | | | |
|---|---|---|---|
| Human | 113 | AGGCACTGAAGGCGGCGGCGGGGCCAGAGGCTCAGCGGCTCCCAGGTGCGGGAGAGAGGC | 172 |
| | | \|\|\|\|\|\|\|\|\|\|\|\|\|\|\|\|\|\|\|\|\|\|\|\|\|\|\|\|\|\|\|\|\|\|\|\|\|\|\|\|\|\|\| \|\| \|\|\|\|\|\|\|\|\|\|\| | |
| Cyno | 113 | AGGCACTGAAGGCGGCGGCGGGGCCAGAGGCTCAGCGGCTCCCCGGGGCGGGAGAGAGNN | 172 |
| Human | 173 | CTGCTGAAAATGACTGAATATAAACTTGTGGTAGTTGGAGCTGGTGGCGTAGGCAAGAGT | 232 |
| | | \|\|\|\|\|\|\|\|\|\|\|\|\|\|\| \|\|\|\|\|\|\|\|\|\|\|\| | |
| Cyno | 173 | NNNNNNNNNNNNNNNNNNNNNNNNNNNNNNNNAGTTGGAGCTGGTGGGGTAGGCAAGAGT | 232 |
| Human | 233 | GCCTTGACGATACAGCTAATTCAGAATCATTTTGTGGACGAATATGATCCAACAATAGAG | 292 |
| | | \|\|\|\|\|\|\|\| \|\|\|\|\|\|\|\|\|\|\|\|\|\|\|\|\|\|\|\|\|\|\|\|\|\|\|\|\|\|\|\|\|\|\|\|\|\|\|\|\|\|\|\|\|\| | |
| Cyno | 233 | GCCTTGACNNNNNNGCTAATTCAGAATCATTTTGTGGACGAATATGATCCAACAATAGAG | 292 |
| Human | 293 | GATTCCTACAGGAAGCAAGTAGTAATTGATGGAGAAACCTGTCTCTTGGATATTCTCGAC | 352 |
| | | \|\|\|\|\|\|\|\|\|\|\|\|\|\|\|\|\|\|\|\|\|\|\|\|\|\|\|\|\|\|\|\|\|\|\|\|\|\|\|\|\|\|\|\|\|\|\|\|\|\|\|\|\|\|\|\|\|\|\|\| | |
| Cyno | 293 | GATTCCTACAGGAAGCAAGTAGTAATTGATGGAGAAACCTGTCTCTTGGATATTCTCGAC | 352 |
| Human | 353 | ACAGCAGGTCAAGAGGAGTACAGTGCAATGAGGGACCAGTACATGAGGACTGGGGAGGGC | 412 |
| | | \|\|\|\|\|\|\|\|\|\|\|\|\|\|\|\|\|\|\|\|\|\|\|\|\|\|\|\|\|\|\|\|\|\|\|\|\|\|\|\|\|\|\|\|\|\|\|\|\|\|\|\|\|\|\|\|\|\|\|\| | |
| Cyno | 353 | ACAGCAGGTCAAGAGGAGTACAGTGCAATGAGGGACCAGTACATGAGGACTGGGGAGGGC | 412 |
| Human | 413 | TTTCTTTGTGTATTTGCCATAAATAATACTAAATCATTTGAAGATATTCACCATTATAGA | 472 |
| | | \|\|\|\|\|\|\|\|\|\|\|\|\|\|\|\|\|\|\|\|\|\|\|\|\|\|\|\|\|\|\|\|\|\|\|\|\|\|\|\|\|\|\|\|\|\|\|\|\|\|\|\|\|\|\|\|\|\|\|\| | |
| Cyno | 413 | TTTCTTTGTGTATTTGCCATAAATAATACTAAATCATTTGAAGATATTCACCATTATAGA | 472 |
| Human | 473 | GAACAAATTAAAAGAGTTAAGGACTCTGAAGATGTACCTATGGTCCTAGTAGGAAATAAA | 532 |
| | | \|\|\|\|\|\|\|\|\|\|\|\|\|\|\|\|\|\|\|\|\|\|\|\|\|\|\|\|\|\|\|\|\|\|\|\|\|\|\|\|\|\|\|\|\|\|\|\|\|\|\|\|\|\|\|\|\|\|\|\| | |
| Cyno | 473 | GAACAAATTAAAAGAGTTAAGGACTCTGAAGATGTACCTATGGTCCTAGTAGGAAATAAA | 532 |
| Human | 533 | TGTGATTTGCCTTCTAGAACAGTAGACACAAAACAGGCTCAGGACTTAGCAAGAAGTTAT | 592 |
| | | \|\|\|\|\|\|\|\|\|\|\|\|\|\|\|\|\|\|\|\|\|\|\|\|\|\|\|\|\|\|\|\|\|\|\|\|\|\|\|\|\|\|\|\|\|\|\|\|\|\|\|\|\|\|\|\|\|\|\|\| | |
| Cyno | 533 | TGTGATTTGCCTTCTAGAACAGTAGACACAAAACAGGCTCAGGACTTAGCAAGAAGTTAC | 592 |
| Human | 593 | GGAATTCCTTTTATTGAAACATCAGCAAAGACAAGACAGGGTGTTGATGATGCCTTCTAT | 652 |
| | | \|\|\|\|\|\|\|\|\|\|\|\|\|\|\|\|\|\|\|\|\|\|\|\|\|\|\|\|\|\|\|\|\|\|\|\|\|\|\|\|\|\|\|\|\|\|\|\|\|\|\|\|\|\|\|\|\|\|\|\| | |
| Cyno | 593 | GGAATTCCTTTTATTGAAACATCAGCAAAGACAAGACAGGGTGTTGATGATGCCTTCTAT | 652 |
| Human | 653 | ACATTAGTTCGagaaattcgaaaacataaagaaaagatgagcaaagatggtaaaaagaaG | 712 |
| | | \|\|\|\|\|\|\|\|\|\|\|\|\|\|\|\|\|\|\|\|\|\|\|\|\|\|\|\|\|\|\|\|\|\|\|\|\|\|\|\|\|\|\|\|\|\|\|\|\|\|\|\|\|\|\|\|\|\|\|\| | |
| Cyno | 653 | ACATTAGTTCGAGAAATTCGAAAACATAAAGAAAAGATGAGCAAAGATGGTAAAAAGAAG | 712 |
| Human | 713 | aaaaagaagtcaaagacaaagTGTGTAATTATGTAAATACAATTTGTACTTTTTTCTTAA | 772 |
| | | \|\|\|\|\|\|\|\|\|\|\|\|\|\|\|\|\|\|\|\|\|\|\|\|\|\|\|\|\|\|\|\|\|\|\|\|\|\|\|\|\|\|\|\|\|\|\|\|\|\|\|\|\|\|\|\|\|\|\|\| | |
| Cyno | 713 | AAAAAGAAGTCAAAGACAAAGTGTGTAATTATGTAAATACAATTTGTACTTTTTTCTTAA | 772 |
| Human | 773 | GGCATACTAGTACAAGTGGTAATTTTTGTACATTACACTAAATTATTAGCATTTGTTTTA | 832 |
| | | \|\|\|\|\|\|\|\|\|\|\|\| \|\|\|\|\|\|\|\|\|\|\|\|\|\|\|\|\|\|\|\|\|\|\|\|\|\|\|\|\|\|\|\|\|\|\|\|\|\|\|\|\|\|\|\|\|\|\| | |
| Cyno | 773 | GGCATACTAGTAAAAGTGGTAATTTTTGTACATTACACTAAATTATTAGCATTTGTTTTA | 832 |
| Human | 833 | GCATTACCTAAtttttttCCTGCTCCATGCAGACTGTTAGCTTTTACCTTAAATGCTTAT | 892 |
| | | \|\|\|\|\|\|\|\|\|\|\|\|\|\|\|\|\|\|\|\|\|\|\|\|\|\|\|\|\|\|\|\|\|\|\|\|\|\|\|\|\|\|\|\|\|\|\|\|\|\|\|\|\|\|\|\|\|\|\|\| | |
| Cyno | 833 | GCATTACCTAATTTTTTTCCTGCTCCATGCAGACTGTTAGCTTTTACCTTAAATGCTTAT | 892 |
| Human | 893 | TTTAAAATGACAGTGGAAGtttttttttCCTCTAAGTGCCAGTATTCCCAGAGTTTTGGT | 952 |
| | | \|\|\|\|\|\|\|\|\|\|\|\|\|\|\|\|\|\|\| \|\|\|\|\|\|\|\|\|\|\|\|\|\|\|\|\|\|\|\|\|\|\|\|\|\|\|\|\|\|\|\|\|\|\|\|\|\|\|\| | |
| Cyno | 893 | TTTAAAATGACAGTGGAAGCTTTTTTTTCCTCTAAGTGCCAGTATTCCCAGAGTTTTGAT | 952 |
| Human | 953 | TTTTGAACTAGCAATGCCTGTGAAAAAGAAACTGAATACCTAAGATTTCTGTCTTGGGGT | 1012 |
| | | \|\|\|\|\|\|\|\|\|\|\|\|\|\|\|\|\|\|\|\|\|\|\|\|\|\|\|\|\|\|\|\|\|\|\|\|\|\|\|\|\|\|\|\|\|\|\|\|\|\|\|\|\|\|\|\|\|\|\|\| | |
| Cyno | 953 | TTTTGAACTAGCAATGCCTGTGAAAAAGAAACTGAATACCTAAGATTTCTGTCTTGGGGT | 1012 |
| Human | 1013 | TTTTGGTGCATGCAGTTGATTACTTCTTATTTTTCTTACCAATTGTGAATGTTGGTGTGA | 1072 |
| | | \|\|\|\|\|\|\|\|\| | |
| Cyno | 1013 | TTTTGGTGCNNNNNNNNNNNNNNNNNNNNNNNNNNNNNNNNNNNNNNNNNNNNNNNNNNN | 1072 |
| Human | 1073 | AACAAATTAATGAAGCTTTTGAATCATCCCTATTCTGTGTTTTATCTAGTCACATAAATG | 1132 |
| | | \|\|\|\|\|\|\|\|\|\|\|\|\|\| \|\|\|\|\|\|\|\|\|\|\|\|\|\|\|\|\|\|\|\|\|\|\|\|\|\|\|\|\|\|\|\|\|\|\|\|\|\|\|\|\| | |
| Cyno | 1073 | NNNNAATTAATGAAGCTTCTGAATCATCCCTATTCTGTGTTTTATCTAGTCACATAAATG | 1132 |
| Human | 1133 | GATTAATTACTAATTTCAGTTGAGACCTTCTAATTGGTTTTTACTGAAACATTGAGGGAA | 1192 |
| | | \|\|\|\|\|\|\|\|\|\|\|\|\|\|\|\|\|\|\|\|\|\|\|\|\|\|\|\|\|\|\|\|\|\|\|\|\|\|\|\|\|\|\|\|\|\|\|\|\|\|\|\|\|\|\|\|\|\|\|\| | |
| Cyno | 1133 | GATTAATTACTAATTTCAGTTGAGACCTTCTAATTGGTTTTTACTGAAACATTGAGGGAA | 1192 |
| Human | 1193 | CACAAATTTATGGGCTTCCTGATGATGATTCTTCTAGGCATCATGTCCTATAGTTTGTCA | 1252 |
| | | \|\|\|\|\|\| \|\|\|\|\|\|\|\|\|\|\|\|\|\|\|\|\|\|\|\|\|\|\|\|\|\|\|\| | |
| Cyno | 1193 | CACAAANNNNNNNNNNNNNNNNNNNNNNNNNNTCTAGGCATCATGTCCTATAGTTTGTCA | 1252 |
| Human | 1253 | TCCCTGATGAATGTAAAGTTACACTGTTCACAAAGGTTTTGTCTCCTTTCCACTGCTATT | 1312 |
| | | \|\|\|\|\|\|\|\|\|\|\|\|\|\|\|\|\|\|\|\|\|\|\|\|\|\|\|\|\|\|\|\|\|\|\|\|\|\|\|\|\|\| \|\|\|\|\|\|\|\|\|\|\|\|\|\|\|\| | |
| Cyno | 1253 | TCCCTGATGAATGTAAAGTTACACTGTTCACAAAGGTTTTGTTCCCTTTCCACTGCTATT | 1312 |
| Human | 1313 | AGTCATGGTCACTCTCCCCAAAATATTATATTTTTTCTATaaaaagaaaaaaatggaaaA | 1372 |
| | | \|\|\|\|\|\|\|\|\|\|\|\|\|\|\|\|\|\|\| \|\|\|\|\|\| | |
| Cyno | 1313 | AGTCATGGTCACTCTCCCCGNNNNNNNNNNNNNNNNNNNNNNNNNNNNNNNNNTGGAAAA | 1372 |
| Human | 1373 | aaaTTACAAGGCAATGGAAACTATTATAAGGCCATTTCCTTTTCACATTAGATAAATTAC | 1432 |
| | | \|\|\|\|\|\|\|\|\|\| \|\|\|\|\|\|\|\|\|\|\|\|\|\|\|\|\|\|\|\|\|\| \|\|\|\|\|\|\|\|\|\|\|\|\|\|\|\|\|\|\|\|\|\|\|\|\|\| | |
| Cyno | 1373 | AAATTACAAGTCAATGGAAACTATTATAAGGCCGTTTCCTTTTCACATTAGATAAATTAC | 1432 |
| Human | 1433 | TATAAAGACTCCTAATAGCTTTTCCTGTTAAGGCAGACCCAGTATGAAATGGGGATTATT | 1492 |
| | | \|\|\|\|\|\|\|\|\|\|\|\|\|\|\|\|\|\|\|\|\|\|\|\|\|\|\|\|\|\|\|\|\|\|\|\|\|\|\|\|\|\|\|\|\|\|\|\|\|\|\|\|\|\|\|\|\| | |
| Cyno | 1433 | TATAAAGACTCCTAATAGCTTTTCCTGTTAAGGCAGACCCAGTATGAAATGGGGATTNNN | 1492 |
| Human | 1493 | ATAGCAACCATTTTGGGGCTATATTTACATGCTACTAAATTTTTATAATAATTGAAAAGA | 1552 |
| | | \|\|\|\|\|\|\|\|\|\|\|\|\|\|\|\|\|\|\|\| \| | |
| Cyno | 1493 | NNNNNNNNNNNNNNNNNNNNNNNNNNNNNNNNNNNNNAATTTTTATAATAATTGAAATAA | 1552 |
| Human | 1553 | TTTTAACAAGTATAAAAAATTCTCATAGGAATTAAATGTAGTCTCCCTGTGTCAGACTGC | 1612 |
| | | \|\|\|\|\|\|\|\| \|\|\|\|\|\|\|\|\|\|\|\|\|\|\|\|\|\|\|\|\|\|\|\|\|\|\|\|\|\|\|\|\|\|\|\|\|\|\|\|\|\|\|\|\|\|\| \|\|\| | |
| Cyno | 1553 | TTTTAACATGTATAAAAAATTCTCATAGGAATTAAATGTAGTCTCCCTGTGTCAGATTGC | 1612 |
| Human | 1613 | TCTTTCATAGTATAACTTTAAATCTTTTCTTCAACTTGAGTCTTTGAAGATAGTTTTAAT | 1672 |
| | | \|\|\|\|\|\|\|\|\|\|\|\|\|\|\|\|\|\|\|\|\|\|\|\|\|\|\|\|\|\|\|\|\|\|\|\|\| \|\|\|\|\|\|\|\|\|\|\| \|\|\|\|\|\|\|\|\|\| | |
| Cyno | 1613 | TCTTTCATAGTATAACTTTAAATCTTTTCTTCAACTTCAGTCTTTGAAGGTAGTTTTAAT | 1672 |
| Human | 1673 | TCTGCTTGTGACATTAAAAGATTATTTGGGCCAGTTATAGCTTATTAGGTGTTGAAGAGA | 1732 |
| | | \|\|\|\|\|\|\|\|\|\|\|\|\|\|\|\|\|\|\|\|\|\|\|\|\|\|\|\|\|\|\|\|\|\|\|\|\|\|\|\|\|\|\|\| \|\|\|\|\|\|\|\|\|\|\|\|\|\|\| | |
| Cyno | 1673 | TCTGCTTGTGACATTAAAAGATTATTTGGGCCAGTTATAGCTTAGTAGGTGTTGAAGAGA | 1732 |
| Human | 1733 | CCAAGGTTGCAAGGCCAGGCCCTGTGTGAACCTTTGAGCTTTCATAGAGAGTTTCACAGC | 1792 |
| | | \|\|\|\|\|\|\|\|\|\|\| \|\|\|\|\|\|\|\|\|\|\|\|\|\|\|\|\|\|\|\|\|\|\|\|\|\|\|\|\|\|\|\|\|\|\|\|\|\|\|\|\|\|\|\|\|\|\|\| | |
| Cyno | 1733 | CCAAGGTTGCATGGCCAGGCCCTGTGTGAACCTTTGAGCTTTCATAGAGAGTTTCACAGC | 1792 |
| Human | 1793 | ATGGACTGTGTCCCCACGGTCATCCAGTGTTGTCATGCATTGGTTAGTCAAAATGGGGAG | 1852 |
| | | \|\|\|\|\|\|\|\|\|\|\|\|\|\|\|\| \|\|\|\|\|\|\|\|\|\|\|\|\|\|\|\|\|\|\|\|\|\|\|\|\|\|\|\|\|\|\|\|\|\|\|\|\|\|\|\|\|\|\| | |
| Cyno | 1793 | ATGGACTGTGTCCCCATGGTCATCCAGTGTTGTCATGCATTGGTTAGTCAAAATGGGGAG | 1852 |
| Human | 1853 | GGACTAGGGCAGTTTGGATAGCTCAACAAGATACAATCTCACTCTGTGGTGGTCCTGCTG | 1912 |
| | | \|\|\|\|\|\|\|\| \|\|\|\|\|\|\|\|\|\|\|\| \|\|\|\|\|\|\|\|\|\|\|\|\| \|\|\|\|\|\|\|\|\|\|\|\|\|\|\|\|\|\|\|\|\|\|\|\| | |
| Cyno | 1853 | GGACTAGGACAGTTTGGATAGGTCAACAAGATACATTCTCACTCTGTGGTGGTCCTGCTG | 1912 |
| Human | 1913 | ACAAATCAAGAGCATTGCTTTTGTTTCTTAAGAAAACAAACTCTTTTTTAAAAATTACTT | 1972 |
| | | \|\|\|\|\|\|\|\|\|\|\|\|\|\|\|\|\|\|\|\|\|\|\|\|\|\| \|\|\|\|\|\|\|\|\| \|\|\|\|\|\|\|\|\|\|\|\|\|\|\|\|\|\|\|\|\|\| | |
| Cyno | 1913 | ACAAATCAAGAGCATTGCTTTTGTTTTTTAAGAAAATGAACTCTTTTTTAAAAATTACTT | 1972 |
| Human | 1973 | TTAAATATTAACTCAAAAGTTGAGATTTTGGGGTGGTGGTGTGCCAAGACATTAAttttT | 2032 |
| | | \|\|\|\|\|\|\|\|\|\|\|\|\|\|\|\|\|\|\|\|\|\|\|\|\|\|\|\|\|\|\|\|\| \|\|\|\|\|\| \|\|\|\|\|\|\|\|\|\|\|\|\|\|\|\|\|\|\| | |
| Cyno | 1973 | TTAAATATTAACTCAAAAGTTGAGATTTTGGGGGGGTGGTATGCCAAGACATTAATTTTT | 2032 |
| Human | 2033 | tttttAAACAATGAAGTGAAAAAGTTTTACAATCTCTAGGTTTGGCTAGTTCTCTTAACA | 2092 |
| | | \|\| \|\|\|\|\|\|\|\|\|\|\|\|\|\|\|\|\|\|\|\|\|\|\|\|\|\|\|\|\|\|\|\|\|\|\|\|\|\|\| | |
| Cyno | 2033 | TTNNNNNNNNNNNNNNNNNNNAAGTTTTACAATCTCTAGGTTTGGCTAGTTCTCTTAACA | 2092 |
| Human | 2093 | CTGGTTAAATTAACATTGCATAAACACTTTTCAAG | 2127 [SEQ ID NO: 1710] |
| | | \|\|\|\|\|\|\|\|\|\|\|\|\|\|\|\|\| \|\|\|\|\|\|\|\|\|\|\|\|\|\|\|\|\| | |
| Cyno | 2093 | CTGGTTAAATTAACATTTCATAAACACTTTTCAAG | 2127 [SEQ ID NO: 1711] |
| Human | 2184 | atttaaaatgttacttattttaaaataaatGAAGTGAGATGGCATGGTGAGGTGAAAGTA | 2243 |
| | | \|\|\|\|\|\|\|\|\|\|\|\|\|\|\|\|\|\|\|\|\|\|\|\|\|\|\| \|\|\|\|\| \|\|\|\|\|\|\|\|\|\|\|\|\|\|\|\|\|\|\|\|\|\|\|\|\|\| | |
| Cyno | 2184 | ATTTAAAATGTTACTTATTTTAAAATATATGAAATGAGATGGCATGGTGAGGTGAAAGTA | 2243 |
| Human | 2244 | TCACTGGACTAGGAAGAAGGTGACTTAGGTTCTAGATAGGTGTCTTTTAGGACTCTGATT | 2303 |
| | | \|\|\|\|\|\|\|\|\|\|\| \|\|\|\|\|\|\|\|\|\|\|\|\|\|\|\|\|\|\|\|\|\|\|\|\|\|\| \|\|\|\|\|\|\|\|\|\|\|\|\|\|\|\|\|\|\| | |
| Cyno | 2244 | TCACTGGACTANNAAGAAGGTGACTTAGGTTCTAGATAGTTGTCTTTTAGGACTCTGATT | 2303 |
| Human | 2304 | TTGAGGACATCACTTACTATCCATTTCTTCATGTTAAAAGAAGTCATCTCAAACTCTTAG | 2363 |
| | | \|\|\|\|\|\|\|\|\|\|\|\|\|\|\|\|\|\|\|\|\|\|\|\|\|\|\|\|\|\|\|\|\|\|\|\|\| | |
| Cyno | 2304 | TTGAGGACATCACTTACTATCCATTTCTTCATGTTAANNNNNNNNNNNNNNNNNNNNNNN | 2363 |
| Human | 2364 | ttttttttttttACAACTATGTAATTTATATTCCATTTACATAAGGATACACTTATTTGT | 2423 |
| | | \|\|\|\|\|\|\|\|\|\|\|\|\|\|\| \|\|\|\|\|\|\|\|\|\|\| \|\|\|\|\|\|\| \|\|\|\|\|\|\|\|\|\|\|\|\|\|\|\|\| | |
| Cyno | 2364 | NNNNNNNTTTTTACAACTATGTGATTTATATTCCGTTTACATGAGGATACACTTATTTGT | 2423 |
| Human | 2424 | CAAGCTCAGCACAATCTGTAAATTTTTAACCTATGTTACACCATCTTCAGTGCCAGTCTT | 2483 |
| | | \|\|\|\|\|\|\|\|\|\|\|\|\|\|\|\|\| \|\|\|\|\|\|\|\|\|\|\|\|\|\|\|\|\|\|\|\|\|\|\|\|\|\|\|\|\|\|\|\|\|\|\|\| \|\|\|\| | |
| Cyno | 2424 | CAAGCTCAGCACAATCTAAAAATTTTTAACCTATGTTACACCATCTTCAGTGCCAATCTT | 2483 |
| Human | 2484 | GGGCAAAATTGTGCAAGAGGTGAAGTTTATATTTGAATATCCATTCTCGTTTTAGGACTC | 2543 |
| | | \|\|\|\|\|\|\|\|\|\|\|\|\|\|\|\|\|\|\|\|\|\|\|\|\|\|\|\|\|\|\|\|\|\|\|\|\|\|\|\|\|\|\|\|\|\|\|\|\|\|\|\|\|\|\|\|\|\|\|\| | |
| Cyno | 2484 | GGGCAAAATTGTGCAAGAGGTGAAGTTTATATTTGAATATCCATTCTCGTTTTAGGACTC | 2543 |
| Human | 2544 | TTCTTCCATATTAGTGTCATCTTGCCTCCCTACCTTCCACATGCCCCATGACTTGATGCA | 2603 |
| | | \| \|\|\|\|\|\|\| \|\|\|\|\|\|\|\|\|\|\|\|\|\|\|\|\| \|\|\|\|\|\|\|\|\|\|\|\|\|\|\|\|\|\|\|\|\|\|\|\|\|\|\|\|\|\|\|\| | |
| Cyno | 2544 | TCCTTCCATGTTAGTGTCATCTTGCCTGCCTACCTTCCACATGCCCCATGACTTGATGCA | 2603 |
| Human | 2604 | GTTTTAATACTTGTAATTCCCCTAACCATAAGATTTACTGCTGCTGTGGATATCTCCATG | 2663 |
| | | \|\|\|\|\|\|\|\|\|\|\|\| \|\|\|\|\|\|\|\|\|\|\|\|\|\|\|\|\|\|\|\|\|\|\|\|\|\|\|\|\|\|\|\| \|\|\|\|\|\|\|\|\|\|\|\|\|\| | |
| Cyno | 2604 | GTTTTAATACTTCTAATTCCCCTAACCATAAGATTTACTGCTGCTATGGATATCTCCATG | 2663 |
| Human | 2664 | AAGTTTTCCCACTGAGTCACATCAGAAATGCCCTACATCTTATTTCCTCAGGGCTCAAGA | 2723 |
| | | \|\|\|\|\|\|\|\|\|\| \|\| | |
| Cyno | 2664 | AAGTTTTCCCNNNNNNNNNNNNNNNNNNNNNNNNNNNNNNNNNNNNNNNNNNNNNNNNGA | 2723 |
| Human | 2724 | GAATCTGACAGATACCATAAAGGGATTTGACCTAATCACTAATTTTCAGGTGGTGGCTGA | 2783 |
| | | \|\|\|\|\|\|\|\|\|\|\|\|\|\|\|\|\|\|\|\| \|\|\|\|\|\|\|\|\|\|\|\|\|\|\|\|\|\|\|\|\|\|\|\|\|\|\|\|\|\|\|\|\|\|\|\| \|\| | |
| Cyno | 2724 | GAATCTGACAGATACCATAATGGGATTTGACCTAATCACTAATTTTCAGGTGGTGGCCGA | 2783 |
| Human | 2784 | TGCTTTGAACATCTCTTTGCTGCCCAATCCATTAGCGACAGTAGGATTTTTCAAACCTGG | 2843 |
| | | \| \|\|\|\|\|\|\| \|\| \|\|\| \|\|\|\|\|\|\|\|\|\|\|\|\|\|\|\|\|\|\|\|\|\|\|\|\|\|\|\|\|\|\|\|\|\|\|\| \|\|\|\|\|\| | |
| Cyno | 2784 | TCCTTTGAAAATATCTCTGCTGCCCAATCCATTAGCGACAGTAGGATTTTTCAGACCTGG | 2843 |
| Human | 2844 | TATGAATAGACAGAACCCTATCCAGTGGAAGGAGAATTTAATAAAGATAGTGCTGAAAGA | 2903 |
| | | \|\|\|\|\|\|\|\|\|\|\|\|\|\|\|\|\|\|\|\|\|\|\|\|\|\|\|\|\|\|\|\|\|\|\|\|\|\|\|\|\|\|\|\|\|\|\|\|\|\|\| \|\|\|\|\|\| \| | |
| Cyno | 2844 | TATGAATAGACAGAACCCTATCCAGTGGAAGGAGAATTTAATAAAGATAGTACTGAAATA | 2903 |
| Human | 2904 | ATTCCTTAGGTAATCTATAACTAGGACTACTCCTGGTAACAGTAATACATTCCATTGTTT | 2963 |
| | | \|\|\|\|\|\| \|\|\|\|\|\|\|\|\|\| \|\|\|\|\|\|\|\|\|\|\|\|\|\|\|\|\|\|\|\|\|\|\|\|\|\|\|\|\|\|\|\|\|\|\|\|\|\|\|\|\|\| | |
| Cyno | 2904 | ATTCCTAAGGTAATCTACAACTAGGACTACTCCTGGTAACAGTAATACATTCCATTGTTT | 2963 |
| Human | 2964 | TAGTAACCAGAAAT | 2977 [SEQ ID NO: 1712] |
| | | \|\|\|\|\|\|\|\|\|\|\|\|\|\| | |
| Cyno | 2964 | TAGTAACCAGAAAT | 2977 [SEQ ID NO: 1713] |
| Human | 3053 | CCAGGCTGGAATGCAGTGGCGCCATCTCAGCTCACTGCAACCTCCATCTCCCAGGTTCAA | 3112 |
| | | \|\|\|\|\|\|\|\|\|\|\|\|\|\|\|\|\|\|\|\|\|\|\|\|\|\|\|\|\|\|\|\|\|\|\|\|\|\|\|\|\|\|\|\|\|\|\|\|\|\|\|\|\|\|\|\|\|\|\|\| | |
| Cyno | 3053 | CCAGGCTGGAATGCAGTGGCGCCATCTCAGCTCACTGCAACCTCCATCTCCCAGGTTCAA | 3112 |
| Human | 3113 | GCGATTCTCGTGCCTCGGCCTCCTGAGTAGCTGGGATTACAGGCGTGTGCCACTACACTC | 3172 |
| | | \|\|\|\|\|\|\|\|\|\|\|\|\|\|\|\|\|\|\| \|\|\|\|\|\|\|\|\|\|\|\|\|\|\|\|\|\|\|\|\|\|\|\| \|\|\|\|\|\| \| \|\|\|\|\|\| | |
| Cyno | 3113 | GCGATTCTCGTGCCTCGGCATCCTGAGTAGCTGGGATTACAGGCATGTGCCNCCACACTC | 3172 |
| Human | 3173 | AACTAATTTTTGTATTTTTAGGAGAGACGGGGTTTCACCCTGTTGGCCAGGCTGGTCTCG | 3232 |
| | | \|\|\|\|\|\|\|\|\|\|\|\|\|\| \|\|\|\|\|\|\|\|\|\|\|\|\| \|\|\|\|\|\|\|\|\|\|\|\| \|\|\|\|\|\|\|\|\|\|\|\|\|\|\|\|\|\| | |
| Cyno | 3173 | AACTAATTTTTGTAGTTTTAGGAGAGACAGGGTTTCACCCTATTGGCCAGGCTGGTCTCG | 3232 |
| Human | 3233 | AACTCCTGACCTCAAGTGATTCACCCACCTTGGCCTCATAAACCTGTTTTGCAGAACTCA | 3292 |
| | | \|\|\|\|\|\|\|\|\|\|\|\|\|\|\|\|\|\|\|\|\|\|\|\|\|\|\|\|\|\| \|\|\|\|\|\|\|\|\| \| \|\|\|\|\|\|\|\|\|\|\|\|\|\|\| | |
| Cyno | 3233 | AACTCCTGACCTCAAGTGATTCACCCACCTNNNCCTCATAAAGCCGTTTTGCAGAACTCA | 3292 |
| Human | 3293 | TTTATTCAGCAAATATTTATTGAGTGCCTACCAGATGCCAGTCACCGCACAAGGCACTGG | 3352 |
| | | \|\|\|\|\|\|\|\|\|\|\|\|\|\|\|\|\|\|\|\|\|\|\|\|\|\|\|\|\|\|\|\|\|\|\|\|\|\|\|\|\|\|\|\| \|\|\|\|\|\|\|\|\|\|\|\|\| | |
| Cyno | 3293 | TTTATTCAGCAAATATTTATTGAGTGCCTACCAGATGCCAGTCATTTCACAAGGCACTGG | 3352 |
| Human | 3353 | GTATATGGTATCCCCAAACAAGAGACATAATCCCGGTCCTTAGGTAGTGCTAG | 3405 |
| | | \|\|\|\|\|\|\|\|\|\|\|\|\|\|\|\|\|\|\|\|\|\|\|\|\|\|\|\|\|\|\|\|\| \|\|\|\|\|\|\|\|\|\|\|\|\|\|\|\|\|\|\| | |
| Cyno | 3353 | GTATATGGTATCCCCAAACAAGAGACATAATCCTGGTCCTTAGCTAGTGCTAG | 3405 |
| Human | 3643 | TTACTGTACACATTAAGGTGTATGTCAGATATTCATATTGACCCAAATGTGTAATATTCC | 3702 |
| | | \|\|\|\|\|\|\|\|\|\|\|\|\|\|\|\|\|\|\|\|\|\|\|\|\|\|\|\|\|\|\|\| \|\|\|\|\|\|\|\| | |
| Cyno | 3643 | TTACTGTACACATTAAGGTGTATGTCAGATATCCATATTGAANNNNNNNNNNNNNNNNNN | 3702 |
| Human | 3703 | AGTTTTCTCTGCATAAGTAATTAAAATATACTTAAAAATTAATAGTTTTATCTGGGTACA | 3762 |
| | | \|\|\|\|\|\|\|\|\|\|\|\|\|\|\|\|\|\|\|\|\|\|\|\|\|\|\|\|\|\|\|\|\|\|\|\|\|\|\|\|\|\|\| | |
| Cyno | 3703 | NNNNNNNNNNNNNNNNATAATTAAAATATACTTAAAAATTAATAGTTTTATCTGGGTACA | 3762 |
| Human | 3763 | AATAAACAGGTGCCTGAACTAGTTCACAGACAAGGAAACTTCTATGTAAAAATCACTATG | 3822 |
| | | \|\| \|\|\|\|\|\|\|\|\|\|\|\|\|\|\|\|\|\|\|\|\|\|\|\|\|\|\|\|\|\|\|\|\|\|\|\|\|\|\|\|\|\|\|\|\|\|\|\|\|\|\|\| \|\|\|\| | |
| Cyno | 3763 | AACAAACAGGTGCCTGAACTAGTTCACAGACAAGGAAACTTCTATGTAAAAATCAGTATG | 3822 |
| Human | 3823 | ATTTCTGAATTGCTATGTGAAACTACAGATCTTTGGAACACTGTTTAGGTAGGGTGTTAA | 3882 |
| | | \|\|\|\| \|\|\|\|\|\|\|\|\|\|\|\|\|\|\|\|\|\|\|\|\|\|\|\| \|\|\|\|\|\|\| \|\|\|\|\|\|\|\|\|\|\| | |
| Cyno | 3823 | ATTTNNNNNNNNNNNNGTGAAACTACAGATCTTTGGAACATTGTTTAGATAGGGTGTTAA | 3882 |
| Human | 3883 | GACTTACACAGTACCTCGTTTCTACACAGAGAAAGAAATGGCCATACTTCAGGAACTGCA | 3942 |
| | | \|\|\|\|\|\|\|\|\|\|\|\|\|\|\| \|\|\|\|\|\|\|\|\|\|\|\| \|\|\|\|\|\|\|\|\|\|\|\|\|\|\|\|\|\|\|\|\|\|\|\|\|\|\|\|\|\|\| | |
| Cyno | 3883 | GACTTACACAGTACCACGTTTCTACACACAGAAAGAAATGGCCATACTTCAGGAACTGCA | 3942 |
| Human | 3943 | GTGCTTATGAGGGGATATTTAGGCCTCTTGAATTTTTGATGTAGATGGGCAtttttttAA | 4002 |
| | | \|\|\|\|\| \|\|\|\|\|\|\|\|\|\|\|\|\|\|\|\|\|\|\|\|\|\|\|\|\|\|\|\|\|\|\|\|\|\|\|\|\|\|\|\|\|\|\|\|\|\|\|\|\|\|\|\|\|\| | |
| Cyno | 3943 | GTGCTAATGAGGGGATATTTAGGCCTCTTGAATTTTTGATGTAGATGGGCATTTTTTTAA | 4002 |
| Human | 4003 | GGTAGTGGTTAATTACCTTTATGTGAACTTTGAATGGTTTAACAAAAGATTTGTTTTTGT | 4062 |
| | | \|\|\|\| \| \|\|\|\|\|\|\|\|\|\|\|\|\|\|\|\|\|\|\|\|\|\|\|\|\|\|\|\|\|\|\|\|\|\|\|\|\|\|\|\|\|\|\|\|\|\|\|\|\|\|\| | |
| Cyno | 4003 | GGTANNTGGTAATTACCTTTATGTGAACTTTGAATGGTTTAACAAAAGATTTGTTTTTGT | 4062 |
| Human | 4063 | AGAGATTTTAAAGGGGGAGAATTCTAGAAATAAATGTTACCTAATTATTACAGCCTTAAA | 4122 |
| | | \|\|\|\|\|\|\|\|\|\|\|\|\|\|\|\|\|\|\|\|\|\| \|\|\|\|\|\|\|\|\|\|\|\|\|\|\|\| \|\|\|\| \|\|\|\|\|\|\|\|\| | |
| Cyno | 4063 | AGAGATTTTAAAGGGGGAGAATGCTAGAAATAAATGTTATCTAANNNNNNNCGCCTTAAA | 4122 |
| Human | 4123 | GACAAAAATCCTTGTTGAAGtttttttaaaaaaaGCTAAATTACATAGACTTAGGCATTA | 4182 |
| | | \|\| \|\|\|\|\|\|\|\|\|\|\|\|\|\|\|\|\|\|\|\|\|\|\| \|\|\|\|\|\|\|\|\|\|\|\|\|\|\|\|\|\|\|\|\| \|\|\|\|\|\|\|\|\|\|\| | |
| Cyno | 4123 | GATAAAAATCCTTGTTGAAGTTTTTTAAAAAAAAGCTAAATTACATAGTCTTAGGCATTA | 4182 |
| Human | 4183 | ACATGTTTGTGGAAGAATATAGCAGACGTATATTGTATCATTTGAGTGAATGTTCCCAAG | 4242 |
| | | \|\|\|\|\|\|\|\|\|\|\|\|\|\|\|\|\|\|\|\|\|\|\|\| \|\| \|\|\|\|\|\|\|\|\|\|\|\|\|\|\|\|\|\|\|\|\|\|\| \|\|\|\|\|\|\|\| | |
| Cyno | 4183 | ACATGTTTGTGGAAGAATATAGCACACATATATTGTATCATTTGAGTGAATATTCCCAAA | 4242 |
| Human | 4243 | TAGGCATTCTAGGCTCTATTTAACTGAGTCACACTGCATAGGAATTTAGAACCTAACTTT | 4302 |
| | | \|\|\|\|\|\|\|\|\|\|\|\|\|\|\|\|\|\|\|\|\|\|\|\|\|\|\|\|\|\|\|\|\|\|\|\|\|\|\|\|\|\|\|\|\|\|\|\|\|\|\|\|\|\|\|\|\|\|\|\| | |
| Cyno | 4243 | TAGGCATTCTAGGCTCTATTTAACTGAGTCACACTGCATAGGAATTTAGAACCTAACTTT | 4302 |
| Human | 4303 | TATAGGTTATCAAAACTGTTGTCACCATTGCACAATTTTGTCCTAATATATACATAGAAA | 4362 |
| | | \|\|\|\|\|\|\|\|\|\|\|\|\|\|\|\|\|\|\|\|\| \| \|\|\|\|\|\|\|\|\|\|\|\|\|\|\|\|\|\|\|\|\|\|\|\| \|\|\|\|\|\| \|\| \| | |
| Cyno | 4303 | TATAGGTTATCAAAACTGTTGCCTCCATTGCACAATTTTGTCCTAATACATACATGGAGA | 4362 |
| Human | 4363 | CTTTGTGGGGCATGTTAAGTTACAGTTTGCACAAGTTCATCTCATTTGTATTCCATTGAT | 4422 |
| | | \|\|\|\|\|\|\|\|\|\|\|\|\|\|\|\|\|\|\|\|\|\|\|\|\|\|\|\|\|\|\|\|\|\|\|\|\|\|\|\|\|\|\|\|\|\|\|\|\|\|\|\|\|\|\|\|\|\|\|\| | |
| Cyno | 4363 | CTTTGTGGGGCATGTTAAGTTACAGTTTGCACAAGTTCATCTCATTTGTATTCCATTGAT | 4422 |
| Human | 4423 | tttttttttcttctaaacattttttcttcaaacagtatataactttttttaggggatttT | 4482 |
| | | \|\|\|\|\|\|\|\|\|\|\|\|\|\|\|\|\|\|\|\|\|\|\|\|\|\|\|\|\|\|\|\|\|\|\|\|\|\|\|\|\|\|\|\|\|\|\|\|\|\|\|\|\|\|\|\|\|\|\|\| | |
| Cyno | 4423 | TTTTTTTTTCTTCTAAACATTTTTTCTTCAAACAGTATATAACTTTTTTTAGGGGATTTT | 4482 |
| Human | 4483 | tttttAGACAGCAAAAACTATCTGAAGATTTCCATTTGTCAAAAAGTAATGATTTCTTGA | 4542 |
| | | \|\|\|\| \|\|\|\|\| \|\|\|\|\|\|\|\|\|\|\|\|\|\|\|\|\|\|\|\|\|\|\|\|\|\|\|\|\|\|\|\|\|\| | |
| Cyno | 4483 | TTTTNNNNNNNNNNNNNNNNTCTGACGATTTCCATTTGTCAAAAAGTAATGATTTCTTGA | 4542 |
| Human | 4543 | TAATTGTGTAGTAATGTTTTTTAGAACCCAGCAGTTACCTTAAAGCTGAATTTATATTTA | 4602 |
| | | \|\|\|\|\| \|\|\|\|\|\|\|\|\|\|\|\|\|\|\| \|\|\|\|\|\|\|\|\|\|\|\|\|\|\|\|\|\|\|\|\|\|\|\|\|\|\|\|\|\|\|\|\|\|\|\|\|\| | |
| Cyno | 4543 | TAATTATGTAGTAATGTTTTTAAGAACCCAGCAGTTACCTTAAAGCTGAATTTATATTTA | 4602 |
| Human | 4603 | GTAACTTCTGTGTTAATACTGGATAGCATGAATTCTGCATTGAGAAACTGAATAGCTGTC | 4662 |
| | | \|\|\|\|\|\|\|\|\|\|\|\|\|\|\|\|\|\|\|\|\|\|\|\|\|\|\|\|\|\|\|\|\|\|\|\|\|\|\|\|\|\|\|\|\|\|\|\|\|\|\|\|\|\| | |
| Cyno | 4603 | ATAACTTCTGTGTTAATACTGGATAGCATGAATTCTGCATTGAGAAACTGAATAGNNNNN | 4662 |
| Human | 4663 | ATAAAATGAAACTTTCTTTCTAAAGAAAGATACTCACATGAGTTCTTGAAGAATAGTCAT | 4722 |
| | | \|\|\|\|\|\|\|\|\|\|\|\|\|\|\|\|\|\|\|\|\|\|\|\| | |
| Cyno | 4663 | NNNNNNNNNNNNNNNNNNNNNNNNNNNNNNNNNNNNCATGAGTTCTTGAAGAATAGTCAT | 4722 |
| Human | 4723 | AACTAGATTAAGATCTGTGTTTTAGTTTAATAGTTTGAAGTGCCTGTTTGGGATAATGAT | 4782 |
| | | \|\|\|\|\|\|\|\|\|\|\|\|\|\|\|\|\|\|\|\|\|\|\|\|\|\|\|\|\|\|\|\|\|\|\|\|\|\|\|\|\|\|\|\|\|\|\|\|\|\|\|\|\|\|\|\|\|\|\|\| | |
| Cyno | 4723 | AACTAGATTAAGATCTGTGTTTTAGTTTAATAGTTTGAAGTGCCTGTTTGGGATAATGAT | 4782 |
| Human | 4783 | AGGTAATTTAGATGAATTTAGGGGaaaaaaaaGTTATCTGCAGATATGTTGAGGGCCCAT | 4842 |
| | | \|\|\|\|\|\|\|\|\|\|\|\|\|\|\|\|\|\|\|\|\|\|\|\| \|\|\|\|\|\|\|\|\|\|\|\|\|\|\|\|\|\|\| \|\|\|\|\|\|\|\|\|\|\|\|\|\|\| | |
| Cyno | 4783 | AGGTAATTTAGATGAATTTAGGGGGAAAAAAAGTTATCTGCAGAAATGTTGAGGGCCCAT | 4842 |
| Human | 4843 | CTCTCCCCCCACACCCCCACAGAGCTAACTGGGTTACAGTGTTTTATCCGAAAGTTTCCA | 4902 |
| | | \|\|\|\|\|\|\|\| \|\|\|\|\|\|\| \|\| \|\|\|\|\|\|\|\|\|\|\|\|\|\|\|\|\|\|\|\|\|\|\|\|\|\|\|\|\|\|\|\|\|\|\|\|\|\|\|\| | |
| Cyno | 4843 | CTCTCCCCACACACCCACATAGAGCTAACTGGGTTACAGTGTTTTATCCGAAAGTTTCCA | 4902 |
| Human | 4903 | ATTCCACTGTCTTGTGTTTTCATGTTGAAAATACTTTTGCATTTTTCCTTTGAGTGCCAA | 4962 |
| | | \|\|\|\|\|\|\|\|\|\|\|\|\|\|\|\|\|\|\|\|\|\|\|\|\|\|\|\|\|\|\|\|\|\|\|\|\|\|\|\|\|\|\|\|\|\|\|\|\|\|\|\|\|\|\|\|\|\|\|\| | |
| Cyno | 4903 | ATTCCACTGTCTTGTGTTTTCATGTTGAAAATACTTTTGCATTTTTCCTTTGAGTGCCAA | 4962 |
| Human | 4963 | TTTCTTACTAGTACTATTTCTTAATGTAACATGTTTACCTGGAATGTATTTTAACTATTT | 5022 |
| | | \|\|\|\|\|\|\|\|\|\|\|\|\|\|\|\|\|\|\|\|\|\|\|\|\|\|\|\|\|\|\|\|\|\|\|\|\|\|\|\|\|\|\|\|\|\|\|\|\|\|\|\|\|\|\|\|\|\|\|\| | |
| Cyno | 4963 | TTTCTTACTAGTACTATTTCTTAATGTAACATGTTTACCTGGAATGTATTTTAACTATTT | 5022 |
| Human | 5023 | TTGTATAGTGTAAACTGAAACATGCACATTTTGTACATTGTGCTTTCTTTTGTGGGACAT | 5082 |
| | | \|\|\|\|\|\|\|\|\|\|\|\|\|\|\|\|\|\|\|\|\|\|\|\|\|\|\|\|\|\|\|\|\|\|\|\|\|\|\|\|\|\|\|\|\|\|\|\|\|\|\|\|\|\|\|\|\|\|\|\| | |
| Cyno | 5023 | TTGTATAGTGTAAACTGAAACATGCACATTTTGTACATTGTGCTTTCTTTTGTGGGACAT | 5082 |
| Human | 5083 | ATGCAGTGTGATCCAGTTGTTTTCCATCATTTGGTTGCGCTGACCTAGGAATGTTGGTCA | 5142 |
| | | \|\|\|\|\|\|\|\|\|\|\|\|\|\|\|\|\|\|\|\|\|\|\|\|\|\|\|\|\|\|\|\|\|\|\|\|\|\|\|\|\|\|\|\|\|\|\|\|\|\|\|\|\|\|\|\|\|\|\|\| | |
| Cyno | 5083 | ATGCAGTGTGATCCAGTTGTTTTCCATCATTTGGTTGCGCTGACCTAGGAATGTTGGTCA | 5142 |
| Human | 5143 | TATCAAACATTAAAAATGACCACTCTTTTAATTGAAATTAACTTTTAAATGTTTATAGGA | 5202 |
| | | \|\|\|\|\|\|\|\|\|\|\|\|\|\|\|\|\|\|\|\|\|\|\|\|\|\|\|\|\|\|\|\|\|\|\|\|\|\|\|\|\|\|\|\|\|\|\|\|\|\|\|\|\|\|\|\|\|\|\|\| | |
| Cyno | 5143 | TATCAAACATTAAAAATGACCACTCTTTTAATTGAAATTAACTTTTAAATGTTTATAGGA | 5202 |
| Human | 5203 | GTATGTGCTGTGAAGTGATCTAAAATTTGTAATATTTTTGTCATGAACTGTACTACTCCT | 5262 |
| | | \|\|\|\|\|\|\|\|\|\|\|\|\|\|\|\|\|\|\|\|\|\|\|\|\|\|\|\|\|\|\|\|\|\|\|\|\|\|\|\|\|\|\|\|\|\|\|\|\|\|\|\|\|\|\|\|\|\|\|\| | |
| Cyno | 5203 | GTATGTGCTGTGAAGTGATCTAAAATTTGTAATATTTTTGTCATGAACTGTACTACTCCT | 5262 |
| Human | 5263 | AATTATTGTAATGTAATAAAAATAGTTACAGTGACaaaaaaaaaaA | 5308 |
| | | \|\|\|\|\|\|\|\|\|\|\|\|\|\|\|\|\|\|\|\|\|\|\|\|\|\|\|\|\|\|\|\|\|\|\|\|\|\|\|\|\|\|\|\|\|\| | |
| Cyno | 5263 | AATTATTGTAATGTAATAAAAATAGTTACAGTGACAAAAAAAAAAA | 5308 |
| Human | | | [SEQ ID NO: 1714] |
| Cyno | | | [SEQ ID NO: 1715] |

[0158] The lowercase letters in the KRAS sequence are an NCBI convention for low-complexity sequences. The matching algorithm frequently excludes these when calculating match scores, as they tend to match against large numbers of things in the genome.

[0159] In one embodiment, the KRAS RNAi agent of the present disclosure comprises a sequence which is identical in the all three of human, rat and cyno KRAS mRNAs. This sequence identity across species facilitates animal testing prior to human testing, since the sequence of the RNAi does not need to be modified due to species-specific differences in the target sequence. In one embodiment, the KRAS RNAi agent comprises a sequence which is identical in the human, mouse and cyno KRAS mRNAs. In various embodiments, the KRAS RNAi agent comprises a sequence which is identical in human and mouse, human and rat, and/or human and cyno.

### Additional Embodiments of a RNAi Agent to KRAS

[0160] The present disclosure pertains to RNAi agents which target human KRAS. In one embodiment, the KRAS RNAi agent comprises a sequence which does not match that of any other mRNA or gene. In one embodiment, the KRAS RNAi agent comprises a sequence which differs from all other known non-KRAS mRNAs or genes by at least 0, 1, 2 or 3 nucleotides. An increase in the number of mismatches between the KRAS RNAi sequence and that of any other gene can decrease the amount of “off-target effects” or the RNAi agent targeting a non-target gene (e.g., a gene that is not KRAS).

[0161] In one embodiment, the KRAS RNAi agent of the present disclosure is administered to a patient in need thereof (e.g., a patient suffering from a KRAS-related disease).

[0162] The patient can also be administered more than one RNAi agent specific to KRAS. In one embodiment, the KRAS RNAi agent(s) of the present disclosure can optionally be administered along with one or more additional pharmaceutical agent appropriate for that disease. In one embodiment, the KRAS RNAi agent(s) of the present disclosure can be optionally administered along with any other appropriate additional treatment, wherein the additional treatment can be a composition (e.g., another agent that can treat a KRAS-related disease such as a cancer treatment) or a method (e.g., surgery to remove a tumor if the KRAS-related disease is a cancer).

[0163] The RNAi agent(s) and additional disease treatment(s) can be administered in any order, simultaneously, concurrently, separately, or sequentially, or in one or multiple doses over time.

### Additional Definitions

[0164] For convenience, the meaning of certain terms and phrases used in the specification, examples, and appended claims, are provided below. If there is an apparent discrepancy between the usage of a term in other parts of this specification and its definition provided in this section, the definition in this section shall prevail.

[0165] As used throughout this disclosure, articles such as “a” and “an” refer to one or more than one (at least one) of the grammatical object of the article.

### RNAi Agent

[0166] In one embodiment, the present disclosure pertains to a KRAS RNAi agent or other composition comprising at least an antisense nucleic acid sequence complementary to a KRAS nucleic acid (or portion thereof), or pertains to a recombinant expression vector encoding an shRNA or composition comprising the antisense nucleic acid that can function as an RNAi as defined below. As used herein, an “antisense” nucleic acid comprises a nucleotide sequence complementary to a “sense” nucleic acid encoding the KRAS protein (e.g., complementary to the coding strand of a double-stranded DNA, complementary to an mRNA or complementary to the coding strand of a KRAS gene or nucleic acid). RNAi agents include, as non-limiting examples, siRNAs (small interfering RNAs), dsRNAs (double stranded RNAs), shRNAs (short hairpin RNAs) and miRNAs (micro RNAs).

[0167] In various embodiments, the present disclosure pertains to any RNAi agent comprising a RNA sequence corresponding to any DNA sequences disclosed herein (e.g., wherein the DNA nucleotides are replaced by the corresponding RNA nucleotide, for example, with T in DNA replaced by U in RNA, and with ribose instead of deoxyribose in the sugar-phosphate backbone).

[0168] In one embodiment, the RNAi comprises a single strand. This single-stranded RNAi agent oligonucleotide or polynucleotide can comprise the sense or antisense strand, as described by Sioud 2005 J. Mol. Biol. 348:1079-1090, and references therein. Thus the disclosure encompasses RNAi agents with a single strand comprising either the sense or antisense strand of an RNAi agent described herein. The disclosure also encompasses RNAi agents comprising a single strand, wherein the single strand comprises the sequences of both the antisense and sense strands of any RNAi agent disclosed herein, e.g., wherein the strands are contiguous, connected by a loop or otherwise linked. Examples of such molecules include those with a hairpin between the sense and anti-sense sequences (e.g., shRNA).

[0169] The RNAi agent(s) of the present disclosure target (e.g., bind to, anneal to, hybridize, etc.) the KRAS mRNA. The use of the RNAi agent specific to KRAS results in a decrease of KRAS activity, level and/or expression, e.g., a “knock-down” (KD) or “knock-out” of the target gene or target sequence. In one embodiment, in the case of a disease state characterized by over-expression or hyper-activity of KRAS, administration of a RNAi agent to KRAS knocks down the KRAS target enough to provide a more normal or therapeutic level of KRAS activity or expression.

[0170] In one embodiment, the RNAi comprises a single strand (such as an shRNA, as described herein).

[0171] In various embodiments, one or both strands contain one or more nicks, i.e., a break or missing bond in the phosphate backbone, such that at least one nucleotide subunit is not covalently linked to the adjacent nucleotide subunit in any given sequence. In some embodiments, the passenger strand is nicked (see, for example, WO 2007/107162). In various embodiments, one or both strands contain one or more gaps, e.g., wherein at least one entire nucleotide subunit is absent from the disclosed sequence. Where a sense or antisense sequence contains a gap, that strand is envisioned to comprise two separate oligonucleotides.

[0172] Particularly useful siRNAs include those which can bind specifically to those regions of the KRAS mRNA that have one or more of the following qualities: binding in the coding segment of KRAS; binding at or near the junction of the 5′ untranslated region and the start of the coding segment; binding at or near the translational start site of the mRNA; binding at, across or near junctions of exons and introns; little or no binding to the mRNAs or transcripts of other genes (little or no “off-target effects”); binding to the KRAS mRNA in or near a region or regions that is not double-stranded or a stem region, e.g., those in a loop or single-stranded portion; eliciting little or no immunogenicity; binding in a segment of the KRAS mRNA sequence which is conserved among various animal species (including human, mouse, rat, cyno, etc.), as the presence of a conserved sequence facilitates testing using various laboratory animals; binding to double-stranded region(s) of the mRNA; binding to an AT-rich region (e.g., at least about 50, 51, 52, 53, 54, 55, 56, 57, 58, 59, or 60% AT-rich); and/or lacking particular sequences known or suspected to decrease siRNA activity, e.g., the presence of a GG sequence at the 5′ end, which may decrease separation of the double-stranded portion of the siRNA. In one embodiment, the RNAi agent specific to KRAS can be a double-stranded RNA having any one or more of these qualities.

[0173] The term “double-stranded RNA” or “dsRNA,” as used herein, refers to a RNAi agent comprising a first and a second strand; e.g., a composition that includes an RNA molecule or complex of molecules having a hybridized duplex region (i.e., a region where the nucleotide bases from the first strand and the second strand are paired) that comprises two anti-parallel and substantially complementary nucleic acid strands, which will be referred to as having “sense” and “antisense” orientations with respect to a target RNA. The antisense strand, with respect to the mRNA target, is also called the “guide” strand, and the sense strand is also called the “passenger” or “anti-guide” strand. The passenger strand can include at least one or more of the following: one or more extra nucleotides (e.g., a bulge or 1 nt loop) compared to the other strand, a nick, a gap, a mismatch, etc., compared to the other strand. In various embodiments, the RNAi agent comprises a first strand and a second strand. In various embodiments, and as used herein and as is clear by context, terminology referring to the first strand refers to the sense strand and the second strand refers to the anti-sense strand as listed in any Table herein. In other embodiments, and as used herein and as is clear by context, the first strand refers to the anti-sense strand, and the second strand refers to the sense strand as listed in any Table herein.

[0174] The duplex region can be of any length that permits specific degradation of a desired target RNA through a RISC pathway, but will typically range from 9 to 36 base pairs (“bp”) in length, e.g., 15-30 bp in length. Considering a duplex between 9 and 36 bp, the duplex can be any length in this range, for example, 9, 10, 11, 12, 13, 14, 15, 16, 17, 18, 19, 20, 21, 22, 23, 24, 25, 26, 27, 28, 29, 30, 31, 32, 33, 34, 35, or 36 bp and any sub-range therebetween, including, but not limited to 15-30 bp, 15-26 bp, 15-23 bp, 15-22 bp, 15-21 bp, 15-20 bp, 15-19 bp, 15-18 bp, 15-17 bp, 18-30 bp, 18-26 bp, 18-23 bp, 18-22 bp, 18-21 bp, 18-20 bp, 19-30 bp, 19-26 bp, 19-23 bp, 19-22 bp, 19-21 bp, 19-20 bp, 19 bp, 20-30 bp, 20-26 bp, 20-25 bp, 20-24 bp, 20-23 bp, 20-22 bp, 20-21 bp, 20 basepairs, 21-30 bp, 21-26 bp, 21-25 bp, 21-24 bp, 21-23 bp, 21-22 bp, 21 bp, 22 bp, or 23 bp. The dsRNAs generated in the cell by processing with Dicer and similar enzymes are generally in the range of about 19 to about 22 bp in length. One strand of the duplex region of a dsRNA comprises a sequence that is substantially complementary to a region of a target RNA. The two strands forming the duplex structure can be from a single RNA molecule having at least one self-complementary duplex region, or can be formed from two or more separate RNA molecules that hybridize to form the duplex. Where the duplex region is formed from two self-complementary regions of a single molecule, the molecule can have a duplex region separated by a single-stranded chain of nucleotides (herein referred to as a “hairpin loop”, e.g., such as found in an shRNA construct) between the 3′-end of one strand and the 5′-end of the respective other strand forming the duplex structure. The hairpin loop can comprise at least one unpaired nucleotide; in some embodiments the hairpin loop can comprise at least 3, at least 4, at least 5, at least 6, at least 7, at least 8, at least 9, at least 10, at least 20, at least 23 or more unpaired nucleotides. Where the two substantially complementary strands of a dsRNA are comprised by separate RNA molecules, those molecules need not, but can, be covalently connected. Where the two strands are connected covalently by a hairpin loop, the construct is generally referred to herein and in the art as a “shRNA”. Where the two strands are connected covalently by means other than a hairpin loop, the connecting structure is referred to as a “linker.”

RNAi Agents to KRAS Comprising Mismatches from the Disclosed Sequences

[0175] Various specific embodiments of a RNAi agent to KRAS are disclosed herein; example sequences are provided in Tables 1, 2 and 3. Specific embodiments of the present disclosure include RNAi agents which comprise sequences differing by 0, 1, 2, or 3 nt (nucleotides) or bp [basepair(s)](e.g., with 0, 1, 2 or 3 mismatches) from any of the RNAi agents listed in Tables 1 to 6, and modified and unmodified variants thereof.

[0176] A mismatch is defined herein as a difference between the base sequence or length when two sequences are maximally aligned and compared. A mismatch is defined as a position wherein the base of one sequence does not match the base of the other sequence. Thus, a mismatch is counted, for example, if a position in one sequence has a particular base (e.g., A), and the corresponding position on the other sequence has a different base (e.g., G). Substitution of A, for example, with T, C, G or U would constitute a mismatch. Substitution of G with T, A, C or U would also constitute a mismatch. Substitution of C with T, G, A or U would also constitute a mismatch. Substitution of U with A, C or G would constitute a mismatch. Note, however, that on a given strand, a U can be replaced by T (either as RNA or, preferably, DNA, e.g., 2′-deoxy-thymidine); the replacement of a U with a T is not a mismatch as used herein, as either U or T can pair with A on the opposite strand. The RNAi agent can thus comprise one or more DNA bases, e.g., T. In some cases, in a portion or portions of the RNAi agent, DNA can be used in place of RNA (e.g., in the seed region), to form a DNA-RNA hybrid. See, for example, Yamato et al. 2011 cancer Gene Ther. 18: 587-597. No mismatch is counted between a DNA portion(s) of the RNAi agent and the corresponding target mRNA if basepairing occurs (e.g., between A, G, C, or T in the DNA portion, and the corresponding U, C, G, or A, respectively in the mRNA).

[0177] A mismatch is also counted, e.g., if a position in one sequence has a base (e.g., A), and the corresponding position on the other sequence has no base (e.g., that position is an abasic nucleotide, which comprises a phosphate-sugar backbone but no base). A single-stranded nick in either sequence (or in the sense or anti-sense strand) is not counted as mismatch. Thus, as a non-limiting example, no mismatch would be counted if one sequence comprises the sequence AG, but the other sequence comprises the sequence AG with a single-stranded nick between the A and the G. A nucleotide modification in the sugar or phosphate is also not considered a mismatch. Thus, if one sequence comprises a C, and the other sequence comprises a modified C (e.g., 2′-modification) at the same position, no mismatch would be counted.

[0178] Thus, no mismatches are counted if modifications are made to the sugar, phosphate, or backbone of the RNAi agent without modifying the base. Thus, a sequence of GGACGAAUAUGAUCCAACA (SEQ ID NO: 1) as an RNA and the same sequence as a PNA (peptide nucleic acid) (or TNA or GNA or FANA) have 0 mismatches from each other.

[0179] It is also noted that the sequences of the RNAi agents in Tables 1 to 6 include sequences which comprise modifications, as detailed in Table 3. It is noted that dTdT (2′-deoxy-thymidine-5′-phosphate and 2′-deoxy-thymidine-5′-phosphate), or in some cases, TT or UU, is added as a cap or extension to both 3′-ends, but this cap or extension is not included in the calculation of the total number of mismatches. In addition, in Table 3, a modified sequence can comprise one or more modifications from the corresponding unmodified sequence. In this case, lowercase “c” represents 2′-O-methylcytidine-5′-phosphate, and lowercase “u” represents 2′-O-methyluridine-5′-phosphate. Uppercase “A”, “C”, “G” and “U” represent the un-modified adenosine-5′-phosphate, cytidine-5′-phosphate, guanosine-5′-phosphate, and uridine-5′-phosphate, respectively. The substitution of modified c for unmodified C does not count as a mismatch in numbering the 0, 1, 2, or 3 mismatches between sequences. This nomenclature is used for all sequences in Tables 1 to 6. Thus, an equal number of mismatches would be calculated (a) between a test sequence and a modified sequence, and (b) between the same test sequence and the corresponding unmodified sequence from the KRAS gene, and (c) between a modified sequence and a differently modified sequence which have the same base sequence.

[0180] In one particular embodiment, the present disclosure comprises a RNAi agent comprising a anti-sense strand comprising at least 15 to 19 contiguous nucleotides differing by 0, 1, 2, or 3 nt from the sequence of the anti-sense strand of: any of the RNAi agents listed in Tables 1 to 6, and modified and unmodified variants thereof.

[0181] The present disclosure pertains to “modified and unmodified variants” of the disclosed sequences.

[0182] An “unmodified variant” of a particular sequence is the corresponding portion of KRAS without any modifications. Example modified sequences are listed in Tables 1, 2 and 3. The “unmodified variants” of the sequences of Tables 1 to 6 have the identical sequence, without base modifications or terminal dTdT. A given sequence and an “unmodified variant” of it differ by 0 nt (and have no mismatches).

[0183] A “modified variant” of a particular sequence comprises one or more (or one or more fewer) modifications to the backbone, sugar, phosphate or base, but do not have any base substitutions (e.g., G for C, or A for G); thus a given sequence and a modified variant thereof differ by 0 nt (and have no mismatches). As another example, a given sequence as a RNA and the same sequence as a PNA are modified variants of each other and differ by 0 nt (and have no mismatches). Similarly, the same sequence (with no base substitutions) as a locked nucleic acid (LNA), Morpholino, threose nucleic acid (TNA), or glycol nucleic acid (GNA) would be a modified variant which has 0 mismatches.

[0184] As detailed below, substituting a single nucleotide at a given position with a modified version of the same nucleotide would produce a modified variant (with 0 mismatches).

[0185] In another particular embodiment, the RNAi agent comprises a sense strand comprising at least 15 contiguous nucleotides differing by 0, 1, 2, or 3 nt from the sense strand of any of the RNAi agents listed in Tables 1 to 6 and modified and unmodified variants thereof.

[0186] RNAi agents to KRAS of the present disclosure can be used in RNA interference.

### Modifications of RNAi Agent Sequences

[0187] The present disclosure encompasses both unmodified sequences and example modified sequences, such as those disclosed in Tables 1, 2 and 3.

[0188] The present disclosure further encompasses any other modification of a disclosed sequence (e.g., a modified variant).

[0189] For example, the disclosure encompasses a RNAi agent with a substitution of a single nucleotide at a given position with a modified version of the same nucleotide. Thus a nucleotide (A, G, C or U) can be replaced by the corresponding 5-fluorouracil, 5-bromouracil, 5-chlorouracil, 5-iodouracil, hypoxanthine, xantine, 4-acetylcytosine, 5-(carboxyhydroxylmethyl) uracil, 5-carboxymethylaminomethyl-2-thiouridine, 5-carboxymethylaminomethyluracil, dihydrouracil, beta-D-galactosylqueosine, inosine, N6-isopentenyladenine, 1-methylguanine, 1-methylinosine, 2,2-dimethylguanine, 2-methyladenine, 2-methylguanine, 3-methylcytosine, 5-methylcytosine, N6-adenine, 7-methylguanine, 5-methylaminomethyluracil, 5-methoxyaminomethyl-2-thiouracil, beta-D-mannosylqueosine, 5′-methoxycarboxymethyluracil, 5-methoxyuracil, 2-methylthio-N6-isopentenyladenine, uracil-5-oxyacetic acid (v), wybutoxosine, pseudouracil, queosine, 2-thiocytosine, 5-methyl-2-thiouracil, 2-thiouracil, 4-thiouracil, 5-methyluracil, uracil-5-oxyacetic acid methylester, uracil-5-oxyacetic acid (v), 5-methyl-2-thiouracil, 3-(3-amino-3-N-2-carboxypropyl) uracil, (acp3) w, or 2,6-diaminopurine.

[0190] Additional modified variants include the addition of any other moiety (e.g., a radiolabel or other tag or conjugate) to the RNAi agent, provided that the base sequence is identical, the addition of other moieties produces a “modified variant” (with no mismatches).

[0191] Various sets of modifications can be used. These include the following formats, which are used in various screens disclosed herein.

### A22S26

[0192] A22 indicates that All UA as 2′-OMe-U A and all CA as 2′-OMe-C A S26 indicates that All U as 2′-OMe-U and all C as 2′-OMe-C All 3′ overhangs as 2′-OMe-U 2′-OMe-U

[0193] In addition to these modifications and patterns (e.g, formats) for modifications, other modifications or sets of modifications of the sequences provided can be generated using common knowledge of nucleic acid modification.

### RNA Interference

[0194] RNA interference (RNAi) is a post-transcriptional, targeted gene-silencing technique that uses double-stranded RNA (dsRNA) to degrade messenger RNA (mRNA) containing the same sequence as the dsRNA. The process of RNAi occurs when ribonuclease Ill (Dicer) cleaves the longer dsRNA into shorter fragments called siRNAs. siRNAs (small interfering RNAs) produced by Dicer are typically about 21 to 23 nucleotides long and comprise about 19 base pair duplexes (though artificial siRNAs or RNAi agents can be shorter or longer, and/or blunt-ended, and/or comprises one or more endcaps). The smaller RNA segments then mediate the degradation of the target mRNA. Dicer has also been implicated in the excision of 21- and 22-nucleotide small temporal RNAs (stRNAs) from precursor RNA of conserved structure that are implicated in translational control. Hutvagner et al. 2001 Science 293: 834. The RNAi response also features an endonuclease complex, commonly referred to as an RNA-induced silencing complex (RISC), which mediates cleavage of single-stranded mRNA complementary to the anti-sense strand of the RNAi agent. Cleavage of the target RNA takes place in the middle of the region complementary to the anti-sense strand of the siRNA duplex.

[0195] In one aspect, an RNA interference agent includes a single-stranded RNA that interacts with a target RNA sequence to direct the cleavage of the target RNA. Without wishing to be bound by theory, the present disclosure contemplates a long double-stranded RNA introduced into plants and invertebrate cells is broken down into siRNA by a Type Ill endonuclease known as Dicer. Sharp et al. 2001 Genes Dev. 15:485. Dicer, a ribonuclease-Ill-like enzyme, processes the dsRNA into 19-23 base pair short interfering RNAs with characteristic two base 3′ overhangs. Bernstein, et al. 2001 Nature 409:363. The siRNAs are then incorporated into an RNA-induced silencing complex (RISC) where one or more helicases unwind the siRNA duplex, enabling one of the now unpaired siRNA strands to act as a “guide” strand to guide target recognition. Nykanen, et al. 2001 Cell 107:309. Upon binding of the antisense guide strand to the appropriate target mRNA, one or more endonucleases within the RISC cleaves the target to induce silencing. Elbashir, et al. 2001 Genes Dev. 15:188. Thus, in one aspect the present disclosure relates to a single-stranded RNA that promotes the formation of a RISC complex to effect silencing of the target gene.

[0196] Kits for RNAi synthesis are commercially available, e.g., from New England Biolabs and Ambion.

[0197] The RNAi agent(s) of the present disclosure target (e.g., bind to, anneal to, etc.) the KRAS mRNA. The use of the RNAi agent to KRAS results in a decrease of KRAS activity, level and/or expression, e.g., a “knock-down” or “knock-out” of the target gene or target sequence. Particularly, in one embodiment, in the case of a disease state characterized by over-expression or hyper-activity of KRAS, administration of a RNAi agent to KRAS knocks down the KRAS target enough to restore a normal level of KRAS activity.

[0198] A suitable RNAi agent can be selected by any process known in the art or conceivable by one of ordinary skill in the art. For example, the selection criteria can include one or more of the following steps: initial analysis of the KRAS gene sequence and design of RNAi agents; this design can take into consideration sequence similarity across species (human, cynomolgus, mouse, etc.) and dissimilarity to other (non-KRAS) genes; screening of RNAi agents in vitro (e.g., at 10 nM in RKO cells); determination of EC50 in RKO cells; determination of viability of cells treated with RNAi agents, including insensitive cells which do not require KRAS for survival, or sensitive cells, which do require KRAS for survival; testing with human PBMC (peripheral blood mononuclear cells), e.g., to test levels of TNF-alpha to estimate immunogenicity, wherein immunostimulatory sequences are less desired; testing in human whole blood assay, wherein fresh human blood is treated with an RNAi agent and cytokine/chemokine levels are determined [e.g., TNF-alpha (tumor necrosis factor-alpha) and/or MCP1 (monocyte chemotactic protein 1)], wherein Immunostimulatory sequences are less desired; determination of gene knockdown in vivo using subcutaneous tumors in test animals; KRAS target gene modulation analysis, e.g., using a pharmacodynamic (PD) marker, for example, other factors whose expression is affected by KRAS, wherein KRAS knockdown leads to a dose-dependent reduction of abundance of those components; and optimization of specific modifications of the RNAi agents.

[0199] The dsRNA molecules (RNAi agents) described herein are thus useful in RNA interference of KRAS.

### Features of a RNAi Agent: Sense Strand, Antisense Strand and (Optional) Overhangs

[0200] In various embodiments, the RNAi agents comprise a first strand and a second strand, e.g., a sense strand and an antisense strand (or an antisense and a sense strand) and, optionally, one or both ends of the duplex containing unpaired nucleotides referred to herein as overhangs.

[0201] The term “antisense strand” refers to the strand of a RNAi agent which includes a region that is substantially complementary to a target sequence. As used herein, the term “region of complementarity” refers to the region on the antisense strand that is substantially complementary to a sequence, for example a target sequence, as defined herein. Where the region of complementarity is not fully complementary to the target sequence, the mismatches may be in the internal or terminal regions of the molecule. Generally, the most tolerated mismatches are in the terminal regions, e.g., within 5, 4, 3, or 2 nucleotides of the 5′ and/or 3′ terminus.

[0202] The term “sense strand,” as used herein, refers to the strand of a RNAi agent that includes a region that is substantially complementary to a region of the antisense strand as that term is defined herein.

[0203] The sequence of a gene may vary from individual to individual, especially at wobble positions within the coding segment, or in the untranslated region; individuals may also differ from each other in coding sequence, resulting in additional differences in mRNA. The sequence of the sense and antisense strands of the RNAi agent can thus be designed to correspond to that of an individual patient, if and where needed. RNAi agents can also be modified in sequence to reduce immunogenicity, binding to undesired mRNAs (e.g., “off-target effects”) or to increase stability in the blood. These sequence variants are independent of chemical modification of the bases or 5′ or 3′ or other end-caps of the RNAi agents.

[0204] The RNAi agents can also have overhangs of 0, 1, or 2 overhangs; in the case of a 0 nt overhang, they are blunt-ended. A RNAi agent can have 0, 1 or 2 blunt ends. In a “blunt-ended RNAi agent” both strands terminate in a base-pair; thus a blunt-ended molecule lacks either 3′ or 5′ single-stranded nucleotide overhangs.

[0205] The RNAi agents can comprise overhang(s), blunt end(s), and/or 5′ and 3′ endcap(s).

[0206] As used herein, the term “overhang” or “nucleotide overhang” refer to at least one unpaired nucleotide that protrudes from the end of at least one of the two strands of the duplex structure of a RNAi agent. For example, when a 3′-end of one strand of a dsRNA extends beyond the 5′-end of the other strand, or vice versa, the unpaired nucleotide(s) form the overhang. A dsRNA can comprise an overhang of at least one nucleotide; alternatively the overhang can comprise at least two nucleotides, at least three nucleotides, at least four nucleotides, at least five nucleotides or more. An overhang can comprise or consist of a nucleotide/nucleoside analog, including a deoxynucleotide/nucleoside. The overhang(s) may be on the sense strand, the antisense strand or any combination thereof. Furthermore, the nucleotide(s) of an overhang can be present on the 5′ end, 3′ end or both ends of either an antisense or sense strand of a dsRNA. The RNAi agent can also optionally comprise a cap. The term “Cap” and the like include a chemical moiety attached to the end of a double-stranded nucleotide duplex, but is used herein to exclude a chemical moiety that is a nucleotide or nucleoside. A “3′ Cap” is attached at the 3′ end of a nucleotide or oligonucleotide and protects the molecule from degradation, e.g., from nucleases, such as those in blood serum or intestinal fluid. A 3′ cap can replace a TT or UU dinucleotide at the end of a blunt-ended RNAi agent. In one embodiment, 3′ end caps are as disclosed in, for example, WO 2005/021749 and WO 2007/128477. A “5′ cap” is attached at the 5′ end of a nucleotide or oligonucleotide. A cap should not interfere (or unduly interfere) with RNAi activity.

[0207] The present disclosure thus contemplates a RNAi agent specific to KRAS comprising an antisense strand (which may be contiguous or connected via a linker or loop) in a RNAi agent. In a more specific embodiment, an RNAi agent comprises an antisense strand and a sense strand which together comprise a double-stranded or complementary region. In one embodiment, it can also optionally comprise one or two overhangs and/or one or two caps. The RNAi agent is used to induce RNA interference of the target gene, KRAS.

### Target and Complementary Sequences

[0208] The RNAi agents of the present disclosure target (e.g., specifically bind to, anneal to, etc.) the mRNA encoding the gene KRAS. The use of the RNAi agent specific to KRAS results in a decrease of KRAS activity, level and/or expression, e.g., a “knock-down” or “knock-out” of the target gene or target sequence. Particularly in one embodiment, in the case of a disease state characterized by over-expression or hyper-activity of KRAS, administration of a RNAi agent to KRAS knocks down the KRAS gene enough to restore a normal level of KRAS activity or expression.

[0209] In one embodiment, the first or second strand of the RNAi comprises a sequence complementary to that of the target nucleic acid, KRAS.

[0210] As used herein, the term “strand comprising a sequence” refers to an oligonucleotide comprising a chain of nucleotides that is described by the sequence referred to using the standard nucleotide nomenclature.

[0211] As used herein, “target sequence” or “target gene” refer to a contiguous portion of the nucleotide sequence of an mRNA molecule formed during the transcription of a gene, e.g., a KRAS gene, including mRNA that is a product of RNA processing of a primary transcription product. The target portion of the sequence will be at least long enough to serve as a substrate for iRNA-directed cleavage at or near that portion. For example, the target sequence will generally be from 9-36 nucleotides (“nt”) in length, e.g., 15-30 nt in length, including all sub-ranges therebetween. As non-limiting examples, the target sequence can be from 15-30 nt, 15-26 nt, 15-23 nt, 15-22 nt, 15-21 nt, 15-20 nt, 15-19 nt, 15-18 nt, 15-17 nt, 18-30 nt, 18-26 nt, 18-23 nt, 18-22 nt, 18-21 nt, 18-20 nt, 19-30 nt, 19-26 nt, 19-23 nt, 19-22 nt, 19-21 nt, 19-20 nt, 19 nt, 20-30 nt, 20-26 nt, 20-25 nt, 20-24 nt, 20-23 nt, 20-22 nt, 20-21 nt, 20 nt, 21-30 nt, 21-26 nt, 21-25 nt, 21-24 nt, 21-23 nt, or 21-22 nt, 21 nt, 22 nt, or 23 nt. The sense and antisense strands of the RNAi comprise a sequence complementary to that of the target nucleic acid, KRAS.

[0212] As used herein, and unless otherwise indicated, the term “complementary” refers to the ability of an oligonucleotide or polynucleotide comprising a first nucleotide sequence to hybridize and form a duplex structure under certain conditions with an oligonucleotide or polynucleotide comprising a second nucleotide sequence. Such conditions can, for example, be stringent, e.g., 400 mM NaCl, 40 mM PIPES pH 6.4, 1 mM EDTA, 50° C. or 70° C. for 12-16 hours followed by washing. Other conditions, such as physiologically relevant conditions as may be encountered inside an organism, can apply. The skilled person will be able to determine the set of conditions most appropriate for a test of complementarity of two sequences in accordance with the ultimate application of the hybridized nucleotides.

[0213] Complementary sequences within a RNAi agent, e.g., within a dsRNA as described herein, include base-paired oligonucleotides or polynucleotides comprising a first nucleotide sequence to an oligonucleotide or polynucleotide comprising a second nucleotide sequence over the entire length of one or both nucleotide sequences. Such sequences can be referred to as “fully complementary” with respect to each other herein. However, where a first sequence is referred to as “substantially complementary” with respect to a second sequence herein, the two sequences can be fully complementary, or they may form one or more, but generally not more than 5, 4, 3 or 2 mismatched base pairs upon hybridization for a duplex up to 30 base pairs, while retaining the ability to hybridize under the conditions most relevant to their ultimate application, e.g., inhibition of gene expression via a RISC pathway. However, where two oligonucleotides are designed to form, upon hybridization, one or more single-stranded overhangs, such overhangs shall not be regarded as mismatches with regard to the determination of complementarity. For example, a dsRNA comprising one oligonucleotide 21 nucleotides in length and another oligonucleotide 23 nucleotides in length, wherein the longer oligonucleotide comprises a sequence of 21 nucleotides that is fully complementary to the shorter oligonucleotide, may yet be referred to as “fully complementary” for the purposes described herein. The term “overhang” describes an unpaired nucleotide at the 3′ or 5′ end of a double-stranded nucleotide duplex, as described above. In one embodiment, the overhang is 1 to 4 nt long and is on the 3′ end.

[0214] “Complementary” sequences, as used herein, may also include, or be formed entirely from, non-Watson-Crick base pairs and/or base pairs formed from non-natural and modified nucleotides, in as far as the above requirements with respect to their ability to hybridize are fulfilled. Such non-Watson-Crick base pairs includes, but are not limited to, Wobble or Hoogstein base pairing. The terms “complementary,” “fully complementary” and “substantially complementary” herein may furthermore be used with respect to the base matching between the sense strand and the antisense strand of a dsRNA, or between the antisense strand of a RNAi agent and a target sequence, as will be understood from the context of their use. As used herein, a polynucleotide that is “substantially complementary to at least part of” a messenger RNA (mRNA) refers to a polynucleotide that is substantially complementary to a contiguous portion of the mRNA of interest (e.g., an mRNA encoding KRAS). For example, a polynucleotide is complementary to at least a part of a KRAS mRNA if the sequence is substantially complementary to a non-interrupted portion of an mRNA encoding KRAS.

[0215] Thus, the RNAi agent of the present disclosure is complimentary or substantially complimentary to a target sequence in the target KRAS and is double-stranded, comprising a sense and an antisense strand (which can be contiguous, linked via a loop, or otherwise joined), where the double-stranded region an be 9 to 36 bp long (particularly for example, 19-22 bp or 19-23 bp long), and can furthermore optionally comprise a 3′ or 5′ overhang, and the RNAi agent can furthermore comprise a 3′ cap. The RNAi agent mediates RNA interference, down-regulating or inhibiting the level, expression and/or activity of KRAS, and/or establishing or re-establishing an approximately normal level of KRAS and/or KRAS activity, or other biological function related to KRAS.

[0216] Thus, the RNAi agent of the present disclosure is complimentary or substantially complimentary to a target sequence in the target KRAS and is double-stranded, comprising a sense and an antisense strand (which can be contiguous, linked via a loop, or otherwise joined), where the double-stranded region an be 9 to 36 bp long (particularly for example, 19-22 bp or 19-23 bp long), and can furthermore optionally comprise a 3′ or 5′ overhang, and the RNAi agent can furthermore comprise a 3′ cap. The RNAi agent mediates RNA interference, down-regulating or inhibiting the level, expression and/or activity of KRAS, and/or establishing or re-establishing an approximately normal level of KRAS activity or expression.

[0217] The term “double-stranded RNA” or “dsRNA,” as used herein, refers to an RNAi agent comprising a first and a second strand; e.g., a composition that includes an RNA molecule or complex of molecules having a hybridized duplex region that comprises two anti-parallel and substantially complementary nucleic acid strands, which will be referred to as having “sense” and “antisense” orientations with respect to a target RNA. The antisense strand, with respect to the mRNA target, is also called the “guide” strand, and the sense strand is also called the “passenger” strand. As used herein, depending on the context, the “first” strand can be the guide or antisense strand, and the “second” strand can be the passenger or sense strand. Also as used herein, again depending on the context, the “first” strand can be the passenger or sense strand, and the “second” strand can be the guide or antisense. The passenger strand can include at least one or more of the following: one or more extra nucleotides (e.g., a bulge or 1 nt loop) compared to the other strand, a nick, a gap, etc., compared to the other strand. In various embodiments, the first strand is the sense strand and the second strand is the anti-sense strand. In other embodiments, the first strand is the anti-sense strand, and the second strand is the sense strand.

[0218] The duplex region can be of any length that permits loading into the RISC complex and subsequent specific degradation of a desired target RNA through a RISC pathway, but will typically range from 9 to 36 base pairs (“bp”) in length, e.g., 15-30 base pairs in length. Considering a duplex between 9 and 36 base pairs, the duplex can be any length in this range, for example, 9, 10, 11, 12, 13, 14, 15, 16, 17, 18, 19, 20, 21, 22, 23, 24, 25, 26, 27, 28, 29, 30, 31, 32, 33, 34, 35, or 36 bp and any sub-range therebetween, including, but not limited to 15-30 base pairs, 15-26 bp, 15-23 bp, 15-22 bp, 15-21 bp, 15-20 bp, 15-19 bp, 15-18 bp, 15-17 bp, 18-30 bp, 18-26 bp, 18-23 bp, 18-22 bp, 18-21 bp, 18-20 bp, 19-30 bp, 19-26 bp, 19-23 bp, 19-22 bp, 19-21 bp, 19-20 bp, 19 bp, 20-30 bp, 20-26 bp, 20-25 bp, 20-24 bp, 20-23 bp, 20-22 bp, 20-21 bp, 20 bp, 21-30 bp, 21-26 bp, 21-25 bp, 21-24 bp, 21-23 bp, 21-22 bp, 21 bp, 22 bp, or 23 bp.

[0219] The dsRNAs generated in the cell by processing with Dicer and similar enzymes are generally in the range of about 19 to about 22 base pairs in length, although artificial RNAi agents can be synthesized or made by any method known in the art. One strand of the duplex region of a dsRNA comprises a sequence that is substantially complementary to a region of a target RNA. The two strands forming the duplex structure can be from a single RNA molecule having at least one self-complementary duplex region, or can be formed from two or more separate RNA molecules that hybridize to form the duplex. Where the duplex region is formed from two self-complementary regions of a single molecule, the molecule can have a duplex region separated by a single stranded chain of nucleotides (herein referred to as a “hairpin loop”, e.g., such as found in an shRNA construct) between the 3′-end of one strand and the 5′-end of the respective other strand forming the duplex structure. The hairpin loop can comprise at least one unpaired nucleotide; in some embodiments the hairpin loop can comprise at least 3, at least 4, at least 5, at least 6, at least 7, at least 8, at least 9, at least 10, at least 20, at least 23 or more unpaired nucleotides. Where the two substantially complementary strands of a dsRNA are comprised by separate RNA molecules, those molecules need not, but can be covalently connected. Where the two strands are connected covalently by a hairpin loop, the construct is generally referred to herein and in the art as a “shRNA”. Where the two strands are connected covalently by means other than a hairpin loop, the connecting structure is referred to as a “linker.” The term “siRNA” is also used herein to refer to a dsRNA as described above.

RNAi Agents Lowering or Normalizing KRAS Level, Expression and/or Activity

[0220] RNAi agents for targeting KRAS include those which bind to a KRAS sequence provided herein and which work to reduce KRAS through a RNAi mechanism. Example RNAi agents (e.g., siRNAs) to KRAS are provided, e.g., in Table 1.

[0221] Any method known in the art can be use to measure changes in KRAS activity, level, and/or expression induced by a KRAS RNAi agent. Measurements can be performed at multiple timepoints, prior to, during and after administration of the RNAi agent, to determine the effect of the RNAi agent.

[0222] The RNAi agents of the present disclosure silence, inhibit the expression of, down-regulate the expression of, and/or suppress the expression of KRAS, such that an approximately normal level of KRAS activity or expression is restored.

[0223] In addition, in various embodiments, depending on the disease condition and biological context, it is acceptable to use the RNAi agents of the present disclosure to establish a level of KRAS expression, activity and/or level which is below the normal level, or above the normal level, depending on the therapeutic outcome that is desired.

[0224] Any method known in the art can be use to measure changes in KRAS activity, level and/or expression induced by a KRAS siRNA. Measurements can be performed at multiple timepoints, prior to, during and after administration of the siRNA, to determine the effect of the siRNA.

[0225] The terms “silence,” “inhibit the expression of,” “down-regulate the expression of,” “suppress the expression of,” and the like, in so far as they refer to a KRAS gene, herein refer to the at least partial suppression of the expression of a KRAS gene, as manifested by a reduction of the amount of KRAS mRNA which may be isolated from or detected in a first cell or group of cells in which a KRAS gene is transcribed and which has or have been treated such that the expression of a KRAS gene is inhibited, as compared to a second cell or group of cells substantially identical to the first cell or group of cells but which has or have not been so treated (control cells). The degree of inhibition is usually expressed in terms of

$$\frac{( mRNA in control cells ) - ( mRNA in treated cell )}{( mRNA in control cells )} \times 100 \% \qquad Equation 1$$

[0226] Alternatively, the degree of inhibition may be given in terms of a reduction of a parameter that is functionally linked to KRAS gene expression, e.g., the amount of protein encoded by a KRAS gene, alteration in expression of a protein whose expression is dependent on KRAS, etc. In principle, KRAS gene silencing may be determined in any cell expressing KRAS, either constitutively or by genomic engineering, and by any appropriate assay. However, when a reference or control is needed in order to determine whether a given RNAi agent inhibits the expression of KRAS by a certain degree and therefore is encompassed by the instant disclosure, the assays provided in the Examples below shall serve as such reference.

[0227] For example, in certain instances, expression of KRAS is suppressed by at least about 10%, 15%, 20%, 25%, 30%, 35%, 40%, 45%, or 50% by administration of a RNAi agent featured in the present disclosure. In some embodiments, KRAS is suppressed by at least about 60%, 70%, or 80% by administration of a RNAi agent featured in the present disclosure. In some embodiments, KRAS is suppressed by at least about 85%, 90%, or 95% or more by administration of a RNAi agent, as described herein. In one embodiment, the degree of KRAS suppression is determined by loss of full length KRAS mRNA in a treated cell compared to an untreated cell. In one embodiment, the degree of KRAS suppression is determined with a phenotypic assay that monitors loss of proliferative activity and/or cell death. Other embodiments are as provided in the Examples.

[0228] The ability of a RNAi agent to suppress KRAS can be first tested in vitro (e.g., using test cells such as RKO).

[0229] RNAi agents which can suppress KRAS in vitro can then be tested for immunostimulation using, for example, a PBMC (peripheral blood mononuclear cell) assay. RNAi agents can also be tested in animal tests. Test and control animals include those which over-express or under-express KRAS, as described in, for example, Hummer et al. 2005 J. Am. Soc. Nephrol. 16: 3160-3166; Randrianarison et al. 2007 Am. J. Physiol. Lung Cell. Mol. Physiol. 294: 409-416; Cao et al. 2006 Am. J. Physiol. Renal Physiol., and references cited therein. RNAi agents which suppress or alter the level, activity and/or expression of KRAS can be used in medicaments to treat various KRAS-related diseases.

[0230] By “lower” in the context of KRAS or a symptom of a KRAS-related disease is meant a statistically significant decrease in such level. The decrease can be, for example, at least 10%, at least 20%, at least 30%, at least 40% or more. If, for a particular disease, or for an individual suffering from a particular disease, the levels or expression of KRAS are elevated, treatment with a KRAS RNAi agent of the present disclosure can particularly reduce the level or expression of KRAS to a level considered in the literature as within the range of normal for an individual without such disorder, or to a level that reduces or ameliorates symptoms of a disease. The level or expression of KRAS can be measured by evaluation of mRNA (e.g., via Northern blots or PCR), or protein (e.g., Western blots). The effect of a RNAi agent on KRAS expression can be determined by measuring KRAS gene transcription rates (e.g., via Northern blots; or reverse transcriptase polymerase chain reaction or real-time polymerase chain reaction).

[0231] As used herein, “down-regulates” refers to any statistically significant decrease in a biological activity and/or expression of KRAS, including full blocking of the activity (i.e., complete inhibition) and/or expression. For example, “down-regulation” can refer to a decrease of at least about 10, 20, 30, 40, 50, 60, 70, 80, 90 or 100% in KRAS level, activity and/or expression.

[0232] As used herein, the term “inhibit” or “inhibiting” KRAS refers to any statistically significant decrease in biological level, activity and/or expression of KRAS, including full blocking of the activity and/or expression. For example, “inhibition” can refer to a decrease of at least about 10, 20, 30, 40, 50, 60, 70, 80, 90 or 100% in KRAS level, activity and/or expression. As used herein, the term “inhibit” similarly refers to a significant decrease in level, activity and/or expression, while referring to any other biological agent or composition.

[0233] By “level”, it is meant that the KRAS RNAi agent can alter the level of KRAS, e.g., the level of KRAS mRNA or the level of KRAS protein, or the level of activity of KRAS.

[0234] Some diseases, such as types of a proliferative disease, including without limitation a solid or liquid cancer, adenocarcinoma, colorectal cancer, advanced and/or metastatic colorectal cancer, colon cancer, lung, non-small cell lung cancer and lung adenocarcinoma, acute myelogenous lung, bladder, brain, breast, cervical, endometrial, gastric, head and neck, kidney, leukemia, myelodysplastic syndrome, myeloid leukemia, liver, melanoma, ovarian, pancreatic, prostate, testicular, thyroid cancers, and cardio-facio-cutaneous (CFC) syndrome and Noonan syndrome, and similar and related diseases, are characterized by a KRAS mutation or excessive KRAS abundance or activity. Particularly in one embodiment, in the case of a disease characterized by over-expression and/or hyper-activity of KRAS, administration of a RNAi agent to KRAS reduces the level, expression and/or activity of KRAS. Thus, in various embodiments, administration of a RNAi agent to KRAS particularly establishes or re-establishes a normal or approximately normal level of KRAS activity, expression and/or level.

[0235] By “normal” or “approximately normal” in terms of level, expression and/or activity, is meant at least: about 50%, about 60%, about 70%, about 80%, about 90%, and/or about 100%; and/or no more than: about 100%, about 120%, about 130%, about 140%, or about 150% of the level, expression or activity of KRAS in a healthy cell, tissue, or organ. This can be measured using, for example, lung or kidney homogenates, as described in Gambling et al. 2004 Kidney Intl. 65: 1774-1781. Particularly in one embodiment, administration of the appropriate amount of the appropriate KRAS RNAi agent restores KRAS level, activity and/or expression to about 50% to about 150%, more particularly about 60% to about 140%, more particularly to about 70% to about 130%, more particularly to about 80% to about 120%, more particularly to about 90% to about 110%, and most particularly to about 100% of that of a healthy cell, tissue or organ. Administration of a KRAS RNAi to a patient with a KRAS-related disease thus particularly restores the level, activity, and/or expression of KRAS and the level of Na⁺ reabsorption to an approximately normal level, as determined by direct measurements of KRAS mRNA or protein levels, or indirect determinations. In addition, the preferred target amount of KRAS level, expression and/or activity after KRAS RNAi agent administration can be calculated to take into account any other perturbations in a KRAS-related pathway. For example, if another factor in a KRAS-related pathway is either over- or under-expressed, KRAS level, expression or activity may be modulated to attain a more normal state.

[0236] In addition, in various embodiments, depending on the disease condition and biological context, it is acceptable to use the RNAi agents of the present disclosure to establish a level of KRAS expression, activity and/or level which is below the normal level, or above the normal level.

### Types of RNAi Agents and Modification Thereof

[0237] The use of RNAi agents or compositions comprising an antisense nucleic acid to down-modulate the expression of a particular protein in a cell is well known in the art. A RNAi agent comprises a sequence complementary to, and is capable of hydrogen bonding to, the coding strand of another nucleic acid (e.g., an mRNA). Thus, in various embodiments, the RNAi agents of the present disclosure encompass any RNAi agents which target (e.g., are complementary, capable of hybridizing or hydrogen bonding to, etc.) any sequence presented, e.g., in any of Tables 1 to 6.

[0238] Once a functional guide strand has been identified, many variations to the guide and/or passenger strand can be made. For example, the RNAi agent may have modifications internally, or at one or both ends. The modifications at the ends can help stabilize the RNAi agent, protecting it from degradation by nucleases in the blood. The RNAi agents may optionally be directed to regions of the KRAS mRNA known or predicted to be near or at splice sites of the gene.

[0239] A RNAi agent can be constructed using chemical synthesis and enzymatic ligation reactions using procedures known in the art. For example, RNAi agent can be chemically synthesized using naturally-occurring nucleotides or variously modified nucleotides designed to decrease off-target effects, and/or increase the biological stability of the molecules or to increase the physical stability of the duplex formed between the antisense and sense nucleic acids, e.g., phosphorothioate derivatives and acridine substituted nucleotides can be used.

[0240] “G,” “C,” “A,” “T” and “U” each generally stand for a nucleotide that contains guanine, cytosine, adenine, thymidine and uracil as a base, respectively. However, the terms “ribonucleotide”, “deoxynucleotide”, or “nucleotide” can also refer to a modified nucleotide or a surrogate replacement moiety. The skilled person is well aware that guanine, cytosine, adenine, and uracil may be replaced by other moieties without substantially altering the base pairing properties of an oligonucleotide comprising a nucleotide bearing such replacement moiety. For example, without limitation, a nucleotide comprising inosine as its base may base pair with nucleotides containing adenine, cytosine, or uracil. Hence, nucleotides containing uracil, guanine, or adenine may be replaced in the nucleotide sequences of dsRNA featured in the present disclosure by a nucleotide containing, for example, inosine. In another example, adenine and cytosine anywhere in the oligonucleotide can be replaced with guanine and uracil, respectively to form Wobble base pairing with the target mRNA. Sequences containing such replacement moieties are suitable for the compositions and methods featured in the present disclosure.

[0241] The skilled artisan will recognize that the term “RNA molecule” or “ribonucleic acid molecule” encompasses not only RNA molecules as expressed or found in nature (i.e., are naturally occurring), but also non-naturally occurring analogs and derivatives of RNA comprising one or more ribonucleotide/ribonucleoside analogs or derivatives as described herein or as known in the art. The RNA can be modified in the nucleobase structure or in the ribose-phosphate backbone structure, e.g., as described herein below. However, the molecules comprising ribonucleoside analogs or derivatives must retain the ability to form a duplex. As non-limiting examples, an RNA molecule can also include at least one modified ribonucleoside, including but not limited to a 2′-O-methyl modified nucleotide, a nucleoside comprising a 5′ phosphorothioate group, a terminal nucleoside linked to a cholesteryl derivative or dodecanoic acid bisdecylamide group, a locked nucleoside, an abasic nucleoside, a 2′-deoxy-2′-fluoro modified nucleoside, a 2′-amino-modified nucleoside, 2′-alkyl-modified nucleoside, morpholino nucleoside, an unlocked ribonucleotide (e.g., an acyclic nucleotide monomer, as described in WO 2003/147824), a phosphoramidate or a non-natural base comprising nucleoside, or any combination thereof. Alternatively, an RNA molecule can comprise at least two modified ribonucleosides, at least 3, at least 4, at least 5, at least 6, at least 7, at least 8, at least 9, at least 10, at least 15, at least 20 or more, up to the entire length of the dsRNA molecule. The modifications need not be the same for each of such a plurality of modified ribonucleosides in an RNA molecule. In one embodiment, modified RNAs contemplated for use in methods and compositions described herein are peptide nucleic acids (PNAs) that have the ability to form the required duplex structure and that permit or mediate the specific degradation of a target RNA via a RISC pathway.

[0242] Examples of modified nucleotides which can be used to generate the RNAi agent include 5-fluorouracil, 5-bromouracil, 5-chlorouracil, 5-iodouracil, hypoxanthine, xantine, 4-acetylcytosine, 5-(carboxyhydroxylmethyl) uracil, 5-carboxymethylaminomethyl-2-thiouridine, 5-carboxymethylaminomethyluracil, dihydrouracil, beta-D-galactosylqueosine, inosine, N6-isopentenyladenine, 1-methylguanine, 1-methylinosine, 2,2-dimethylguanine, 2-methyladenine, 2-methylguanine, 3-methylcytosine, 5-methylcytosine, N6-adenine, 7-methylguanine, 5-methylaminomethyluracil, 5-methoxyaminomethyl-2-thiouracil, beta-D-mannosylqueosine, 5′-methoxycarboxymethyluracil, 5-methoxyuracil, 2-methylthio-N6-isopentenyladenine, uracil-5-oxyacetic acid (v), wybutoxosine, pseudouracil, queosine, 2-thiocytosine, 5-methyl-2-thiouracil, 2-thiouracil, 4-thiouracil, 5-methyluracil, uracil-5-oxyacetic acid methylester, uracil-5-oxyacetic acid (v), 5-methyl-2-thiouracil, 3-(3-amino-3-N-2-carboxypropyl) uracil, (acp3)w, and 2,6-diaminopurine.

[0243] A “modified variant” of a sequence disclosed herein includes any variant comprising the same sequence, but with a modification in the base, sugar, phosphate or backbone (but not a base substitution, e.g., A for G, or C for U). Thus, a modified variant can comprise any modified nucleotide described above (e.g., 5-fluorouracil, 5-bromouracil, 5-chlorouracil, 5-iodouracil, hypoxanthine, xantine, 4-acetylcytosine, 5-(carboxyhydroxylmethyl) uracil, etc.). When a base is replaced by a corresponding modified base (e.g., A for modified A), these modified nucleotides do not constitute a mismatch or base difference. Thus a given sequence with a U at a particular position and a modified variant comprising a 5-fluorouracil, 5-bromouracil, 5-chlorouracil, or 5-iodouracil at the same sequence would differ by 0 nt (or have no mismatches); however, a given sequence with a C at a particular position and a different sequence with a 5-fluorouracil (wherein the two sequences are otherwise identical) would differ by 1 nt (1 mismatch).

[0244] Replacing the 3-terminal nucleotide overhanging segments of a 21-mer siRNA duplex having two-nucleotide 3-overhangs with deoxyribonucleotides does not have an adverse effect on RNAi activity. Replacing up to four nucleotides on each end of the siRNA with deoxyribonucleotides has been well tolerated, whereas complete substitution with deoxyribonucleotides results in no RNAi activity. International PCT Publication No. WO 00/44914, and Beach et al. International PCT Publication No. WO 01/68836 preliminarily suggest that siRNA may include modifications to either the phosphate-sugar backbone or the nucleoside to include at least one of a nitrogen or sulfur heteroatom. Kreutzer et al. Canadian Patent Application No. 2,359,180, also describe certain chemical modifications for use in dsRNA constructs in order to counteract activation of double-stranded RNA-dependent protein kinase PKR, specifically 2′-amino or 2′-O-methyl nucleotides, and nucleotides containing a 2′-0 or 4′-C methylene bridge. Additional 3-terminal nucleotide overhangs include dT (deoxythimidine), 2′-0,4′-C-ethylene thymidine (eT), and 2-hydroxyethyl phosphate (hp). 4-thiouracil and 5-bromouracil substitutions can also be made. Parrish et al. 2000 Molecular Cell 6: 1077-1087.

[0245] Those skilled in the art will appreciate that it is possible to synthesize and modify the siRNA as desired, using any conventional method known in the art (see Henschel et al. 2004 DEQOR: a web-based tool for the design and quality control of siRNAs. Nucleic Acids Research 32 (Web Server Issue): W113-W120). In addition, if the RNAi agent is a shRNA, it will be apparent to those skilled in the art that there are a variety of regulatory sequences (for example, constitutive or inducible promoters, tissue-specific promoters or functional fragments thereof, etc.) which are useful for shRNA expression construct/vector.

[0246] There are several examples in the art describing sugar, base, phosphate and backbone modifications that can be introduced into nucleic acid molecules with significant enhancement in their nuclease stability and efficacy. For example, oligonucleotides are modified to enhance stability and/or enhance biological activity by modification with nuclease resistant groups, for example, 2′-amino, 2′-C-allyl, 2′-flouro, 2′-O-methyl, 2′-O-allyl, 2′-H, nucleotide base modifications (for a review see Usman and Cedergren 1992 TIBS. 17: 34; Usman et al. 1994 Nucleic Acids Symp. Ser. 31: 163; Burgin et al. 1996 Biochemistry 35: 14090). Sugar modification of nucleic acid molecules are extensively described in the art.

[0247] In various embodiments, the RNAi agent comprises a 2′-modification selected from the group consisting of: 2′-deoxy, 2′-deoxy-2′-fluoro, 2′-O-methyl, 2′-O-methoxyethyl (2′-O-MOE), 2′-O-aminopropyl (2′-O-AP), 2′-O-dimethylaminoethyl (2′-O-DMAOE), 2′-O-dimethylaminopropyl (2′-O-DMAP), 2′-O-dimethylaminoethyloxyethyl (2′-O-DMAEOE), and 2′-O—N-methylacetamido (2′-O-NMA).

[0248] Additional modifications and conjugations of RNAi agents have been described. Soutschek et al. 2004 Nature 432: 173-178 presented conjugation of cholesterol to the 3′-end of the sense strand of a siRNA molecule by means of a pyrrolidine linker, thereby generating a covalent and irreversible conjugate. Chemical modifications (including conjugation with other molecules) of RNAi agents may also be made to improve the in vivo pharmacokinetic retention time and efficiency.

[0249] In various embodiments, the RNAi agent to KRAS comprises at least one 5′-uridine-adenine-3′ (5′-ua-3′) dinucleotide, wherein the uridine is a 2′-modified nucleotide; at least one 5′-uridine-guanine-3′ (5′-ug-3′) dinucleotide, wherein the 5′-uridine is a 2′-modified nucleotide; at least one 5′-cytidine-adenine-3′ (5′-ca-3′) dinucleotide, wherein the 5′-cytidine is a 2′-modified nucleotide; and/or at least one 5′-uridine-uridine-3′ (5′-uu-3′) dinucleotide, wherein the 5′-uridine is a 2′-modified nucleotide. In certain embodiments, the RNAi agent can comprise a non-natural nucleobase, wherein the non-natural nucleobase is difluorotolyl, nitroindolyl, nitropyrrolyl, or nitroimidazolyl. In a particular embodiment, the non-natural nucleobase is difluorotolyl. In certain embodiments, only one of the two oligonucleotide strands contains a non-natural nucleobase. In certain embodiments, both of the oligonucleotide strands contain a non-natural nucleobase.

[0250] In another embodiment, the RNAi comprises a gap or contains mismatch comprising an abasic nucleotide.

[0251] In another embodiment, the RNAi agent has a single-stranded nick (e.g., a break or missing bond in the backbone). In various embodiments, a single-stranded nick can be in either the sense or anti-sense strand, or both.

[0252] This nick can be, for example, in the sense strand, producing a small internally segmented interfering RNA, or sisiRNA, which may have less off-target effects than the corresponding RNAi agent without a nick. See, for example, WO 2007/107162 to Wengels and Kjems.

[0253] The antisense nucleic acid or RNAi agent can also have an alternative backbone such as locked nucleic acids (LNA), Morpholinos, peptidic nucleic acids (PNA), threose nucleic acid (TNA), or glycol nucleic acid (GNA), or FANA and/or it can be labeled (e.g., radiolabeled or otherwise tagged). FANA are described in Dowler et al. 2006 Nucl. Acids Res. 34: 1669-1675.

[0254] One or both strands can comprise an alternative backbone.

[0255] In yet another embodiment, the RNAi agent employed by the methods of the present disclosure can include an α-anomeric nucleic acid molecule. An α-anomeric nucleic acid molecule forms specific double-stranded hybrids with complementary RNA in which, contrary to the usual β-units, the strands run parallel to each other. Gaultier et al. 1987 Nucleic Acids. Res. 15: 6625-6641.

[0256] The antisense nucleic acid molecule can also comprise a 2′-o-methylribonucleotide (Inoue et al. 1987 Nucleic Acids Res. 15: 6131-6148) or a chimeric RNA-DNA analogue (Inoue et al. 1987 FEBS Lett. 215: 327-330).

[0257] Other modifications and/or other changes can be made to the RNAi agent. A portion of the RNAi agent can be double-stranded DNA, while another portion is double-stranded RNA, forming a DNA-RNA chimera (See, for example, Yamato et al. 2011. Cancer Gene Ther. 18: 587-597). Mismatches between the guide and passenger stand can also be introduced, though some positions may be better suited than others (See, for example, U.S. Patent App. No. 2009/0209626 to Khvorova). The passenger strand can also be shortened, to as short as 15 or 16 nt, while the guide strand remains 19 nt or longer (See, for example, Sun et al. 2008 Nature Biotech. 26: 1379-1382; and Chu and Rana 2008 RNA 14: 1714-1719). This can increase incorporation of the guide strand into the RNA-induced Silence Complex (RISC), and decrease incorporation of the passenger strand, than reducing off-target effects. In some cases, the passenger strand may be more amenable to modification (e.g., single-stranded nicking, nucleotide modifications, and shortening) than the guide strand.

[0258] These and many other modifications can be made once a functional guide strand is identified.

### Pharmaceutical Compositions of RNAi Agents

[0259] As used here, a “pharmaceutical composition” comprises a pharmaceutically effective amount of one or more KRAS RNAi agent, a pharmaceutically acceptable carrier, and, optionally, an additional disease treatment which works synergistically with the RNAi agent. As used herein, “pharmacologically effective amount,” “therapeutically effective amount” or simply “effective amount” refers to that amount of a RNAi agent effective to produce the intended pharmacological, therapeutic or preventive result. For example, if a given clinical treatment is considered effective where there is at least a 10% reduction in a measurable parameter associated with a disease or disorder, a therapeutically effective amount of a drug for the treatment of that disease or disorder is the amount necessary to effect at least a 10% reduction in that parameter. In this embodiment, a therapeutically effective amount of a RNAi agent targeting KRAS can reduce KRAS protein levels by at least 10%. In additional embodiments, a given clinical treatment is considered effective where there is at least a 15, 20, 25, 30, 35, 40, 45, 50, 55, 60, 65, 70, 75, 80, 85, 90 or 95% reduction in a measurable parameter associated with a disease or disorder, and the therapeutically effective amount of a drug for the treatment of that disease or disorder is the amount necessary to effect at least a 15, 20, 25, 30, 35, 40, 45, 50, 55, 60, 65, 70, 75, 80, 85, 90 or 95% reduction, respectively, in that parameter.

[0260] The term “pharmaceutically acceptable carrier” refers to a carrier for administration of a therapeutic agent. Such carriers include, but are not limited to, lipid nanoparticles, saline, buffered saline, dextrose, water, glycerol, ethanol, and combinations thereof. The term specifically excludes cell culture medium. Any appropriate pharmaceutical carrier known in the art can be used in conjunction with the RNAi agents disclosed herein.

### Pharmaceutical Composition Comprising a RNAi Agent to KRAS

[0261] Additional components of a pharmaceutical composition comprising a RNAi Agent to KRAS are contemplated to aid in delivery, stability, efficacy, or reduction of immunogenicity.

[0262] Liposomes have been used previously for drug delivery (e.g., delivery of a chemotherapeutic). Liposomes (e.g., cationic liposomes) are described in PCT publications WO02/100435A1, WO03/015757A1, WO04029213A2; and WO/2011/076807; U.S. Pat. Nos. 5,962,016; 5,030,453; and 6,680,068; and U.S. Patent Application 2004/0208921. A process of making liposomes is also described in WO04/002453A1. Furthermore, neutral lipids have been incorporated into cationic liposomes (e.g., Farhood et al. 1995), as well as PEGylated lipids.

[0263] Cationic liposomes have been used to deliver RNAi agent to various cell types (Sioud and Sorensen 2003; U.S. Patent Application 2004/0204377; Duxbury et al., 2004; Donze and Picard, 2002).

[0264] Use of neutral liposomes disclosed in Miller et al. 1998, and U.S. Patent Application 2003/0012812.

[0265] As used herein, the term “SNALP” refers to a stable nucleic acid-lipid particle. A SNALP represents a vesicle of lipids coating a reduced aqueous interior comprising a nucleic acid such as an iRNA or a plasmid from which an iRNA is transcribed. SNALPs are described, e.g., in U.S. Patent Application Publication Nos. 20060240093, 20070135372, and in International Application No. WO 2009082817.

[0266] Chemical transfection using lipid-based, amine-based and polymer-based techniques, is disclosed in products from Ambion Inc., Austin, Tex.; and Novagen, EMD Biosciences, Inc, an Affiliate of Merck KGaA, Darmstadt, Germany); Ovcharenko D (2003) “Efficient delivery of siRNAs to human primary cells.” Ambion TechNotes 10 (5): 15-16). Additionally, Song et al. (Nat Med. published online (Feb. I 0, 2003) doi: 10.1038/nm828) and others [Caplen et al. 2001 Proc. Natl. Acad. Sci. (USA), 98: 9742-9747; and McCaffrey et al. Nature 414: 34-39] disclose that liver cells can be efficiently transfected by injection of the siRNA into a mammal's circulatory system.

[0267] A variety of molecules have been used for cell-specific RNAi agent delivery. See, for example, WO/2011/076807. For example, the nucleic acid-condensing property of protamine has been combined with specific antibodies to deliver siRNAs. Song et al. 2005 Nat Biotech. 23: 709-717. The self-assembly PEGylated polycation polyethylenimine (PEI) has also been used to condense and protect siRNAs. Schiffelers et al. 2004 Nucl. Acids Res. 32: e149, 141-1 10.

[0268] The RNAi agents of the present disclosure can be delivered via, for example, Lipid nanoparticles (LNP); neutral liposomes (NL); polymer nanoparticles; double-stranded RNA binding motifs (dsRBMs); or via modification of the RNAi agent (e.g., covalent attachment to the dsRNA) or by any method known in the art for delivery of a RNAi agent comprising nucleic acids.

[0269] Lipid nanoparticles (LNP) are self-assembling cationic lipid based systems. These can comprise, for example, a neutral lipid (the liposome base); a cationic lipid (for siRNA loading); cholesterol (for stabilizing the liposomes); and PEG-lipid (for stabilizing the formulation, charge shielding and extended circulation in the bloodstream).

[0270] The cationic lipid can comprise, for example, a headgroup, a linker, a tail and a cholesterol tail. The LNP can have, for example, good tumor delivery, extended circulation in the blood, small particles (e.g., less than 100 nm), and stability in the tumor microenvironment (which has low pH and is hypoxic).

### Neutral Liposomes (NL) are Non-Cationic Lipid Based Particles.

[0271] Polymer nanoparticles are self-assembling polymer-based particles.

[0272] Double-stranded RNA binding motifs (dsRBMs) are self-assembling RNA binding proteins, which will need modifications.

[0273] In various embodiments, the RNAi agent to KRAS is packaged as a monotherapy into a delivery vehicle, or may be further ligated to one or more diagnostic compound, reporter group, cross-linking agent, nuclease-resistance conferring moiety, natural or unusual nucleobase, lipophilic molecule, cholesterol, lipid, lectin, steroid, uvaol, hecigenin, diosgenin, terpene, triterpene, sarsasapogenin, Friedelin, epifriedelanol-derivatized lithocholic acid, vitamin, carbohydrate, dextran, pullulan, chitin, chitosan, synthetic carbohydrate, oligo lactate 15-mer, natural polymer, low- or medium-molecular weight polymer, inulin, cyclodextrin, hyaluronic acid, protein, protein-binding agent, integrin-targeting molecule, polycationic, peptide, polyamine, peptide mimic, and/or transferrin.

[0274] The RNAi agents of the present disclosure can be prepared in a pharmaceutical composition comprising various components appropriate for the particular method of administration of the RNAi agent.

### KRAS-Related Diseases

[0275] The present disclosure encompasses RNAi agents to KRAS and administration of the RNAi agents to humans and non-human animals to treat various KRAS-related diseases.

[0276] By “KRAS-related disease” is meant any disease related to a dysfunction in the level, expression and/or activity of KRAS, and/or any disease which can be treated and/or ameliorated by modulating the level, expression and/or activity of KRAS. In particular, it includes a proliferative disease, including without limitation a solid or liquid cancer, e.g., adenocarcinoma, colorectal cancer, advanced and/or metastatic colorectal cancer, colon cancer, lung, non-small cell lung cancer and lung adenocarcinoma, acute myelogenous lung, bladder, brain, breast, cervical, endometrial, gastric, head and neck, kidney, leukemia, myelodysplastic syndrome, myeloid leukemia, liver, melanoma, ovarian, pancreatic, prostate, testicular, thyroid cancers, and cardio-facio-cutaneous (CFC) syndrome and Noonan syndrome, and similar and related diseases.

[0277] For additional information on KRAS-related diseases, see, for example: Bos. 1989. Cancer Res. 49. 17: 4682-9; Engelman et al. 2008. Nature Med. 14: 1351-1356; Haigis et al. 2008 Nature Gen. 40: 600-608; Karapetis et al. 2008 N. E. J. Med. 359: 1757-1765; Kiaris et al. 1995. Int. J. Oncol. 7: 413-421; Liu et al. 1987 Nature 330: 186-188; Riely et al. 2008 Clin. Cancer Res. 14: 5731; and Riely et al. 2009. Proc. Am. Thorac. Soc. 6: 201-205. KRAS mutation, hyperactivity or over-expression is also associated with cardio-facio-cutaneous (CFC) syndrome and Noonan syndrome. Adachi et al. 2012 Seizure: Eur. J. Epilepsy 21: 55-60; Kim et al. 2011. J. Korean Soc. Neonatol. 18: 374-378.

[0278] RNAi agents to KRAS can thus be used to treat KRAS-related diseases, particularly those diseases associated with altered expression, activity and/or levels of KRAS.

### Use of RNAi Agents for Treatment of KRAS-Related Diseases

[0279] The RNAi agents to KRAS described herein can be formulated into pharmaceutical compositions which can be administered to humans or non-human animals. These compositions can comprise one or more RNAi agents, and, optionally, additional treatments useful for treating KRAS-related diseases. They can be administered as part of an early/preventative treatment, and can be administered in a therapeutically-effective dosage. The pharmaceutical composition can comprise a pharmaceutical carrier and can be administered by any method known in the art. These various aspects of the present disclosure are described in additional detail below.

[0280] RNAi agents to KRAS can be administered to humans and non-human animals for treatment of KRAS-related diseases.

[0281] In one embodiment of the present disclosure, the compositions comprising a KRAS RNAi agent can be administered to non-human animals. For example, the compositions can be given to chickens, turkeys, livestock animals (such as sheep, pigs, horses, cattle, etc.), companion animals (e.g., cats and dogs) and can have efficacy in treatment of proliferative disease, cardio-facio-cutaneous (CFC) syndrome or Noonan syndrome, and similar diseases. In each case, the RNAi agent to KRAS would be selected to match the sequence of the KRAS of the genome of the animal, and to, particularly, contain at least 1 nt mismatch from all other genes in that animal's genome. The RNAi agents of the present disclosure can thus be used in treatment of KRAS-related diseases in humans and non-human animals.

[0282] As used herein in the context of KRAS expression, the terms “treat,” “treatment,” and the like, refer to relief from or alleviation of pathological processes mediated by KRAS expression. In the context of the present disclosure insofar as it relates to any of the other conditions recited herein below (other than pathological processes mediated by KRAS expression), the terms “treat,” “treatment,” and the like mean to relieve or alleviate at least one symptom associated with such condition, or to slow or reverse the progression or anticipated progression of such condition, such as slowing the progression of a lipid disorder, such as atherosclerosis.

[0283] By “treatment” is also meant prophylaxis, therapy, cure, or any other change in a patient's condition indicating improvement or absence of degradation of physical condition. By “treatment” is meant treatment of KRAS-related disease (e.g., a proliferative disease, including without limitation a solid or liquid cancer, adenocarcinoma, colorectal cancer, advanced and/or metastatic colorectal cancer, colon cancer, lung, non-small cell lung cancer and lung adenocarcinoma, acute myelogenous lung, bladder, brain, breast, cervical, endometrial, gastric, head and neck, kidney, leukemia, myelodysplastic syndrome, myeloid leukemia, liver, melanoma, ovarian, pancreatic, prostate, testicular, thyroid cancers, or cardio-facio-cutaneous (CFC) syndrome or Noonan syndrome), or any appropriate treatment of any other ailment the patient has. As used herein, the terms “treatment” and “treat” refer to both prophylactic and preventative treatment and curative or disease-modifying treatment, including treatment of patients at risk of contracting a disease or suspected of having a disease, as well as patients already ill or diagnosed as suffering from a condition. The terms “treatment” and “treat” also refer to the maintenance and/or promotion of health in an individual not suffering from a disease but who may be susceptible to developing an unhealthy condition, such as nitrogen imbalance or muscle loss. In one embodiment, “treatment” does not encompass prevention of a disease state. Thus, the present disclosure is useful for suppressing expression of KRAS and/or treating a KRAS-related disease in an individual afflicted by a KRAS-related disease, or an individual susceptible to a KRAS-related disease. An individual “afflicted” by a KRAS-related disease has demonstrated detectable symptoms characteristics of the disease, or had otherwise been shown clinically to have been exposed to or to carry KRAS-related disease pathogens or markers. As non-limiting examples, an individual afflicted by a KRAS-related disease can show outward symptoms, or can show no outward symptoms but can be shown with a clinical test to carry protein markers associated with a KRAS-related disease, or proteins or genetic material associated with a pathogen in the blood.

[0284] Early treatment of some KRAS-related diseases may be more efficacious if administered early rather than later. Thus, in one particular embodiment, the RNAi agent to KRAS is administered early, prior to disease manifestation, and/or as a preventative agent, rather than administered after disease establishment.

[0285] Treatments of KRAS-related diseases can comprise various treatments, comprising a KRAS RNAi agent, and optionally further comprising an additional treatment, which can be a method (or procedure), or an additional composition (e.g., an agent or additional RNAi agent).

### Dosages and Effective Amounts of RNAi Agents

[0286] The RNAi agents of the present disclosure are administered in a dosage of a therapeutically effective amount to a patient in need thereof.

[0287] An “effective amount” or a “therapeutically effective amount” is an amount that treats a disease or medical condition of an individual, or, more generally, provides a nutritional, physiological or medical benefit to an individual. As used herein, the phrases “therapeutically effective amount” and “prophylactically effective amount” refer to an amount that provides a therapeutic benefit in the treatment, prevention, or management of pathological processes mediated by KRAS expression or an overt symptom of pathological processes mediated by KRAS expression. The specific amount that is therapeutically effective can be readily determined by an ordinary medical practitioner, and may vary depending on factors known in the art, such as, for example, the type of pathological processes mediated by KRAS expression, the patient's history and age, the stage of pathological processes mediated by KRAS expression, and the administration of other agents that inhibit pathological processes mediated by KRAS expression.

[0288] In various embodiments of the present disclosure, the patient is at least about 1, 3, 6, or 9 months, or 1, 5, 10, 20, 30, 40, 50, 55, 60, 65, 70, or 75 years of age. In various embodiments, the patient is no more than about 1, 3, 6, or 9 months, or 1, 5, 10, 20, 30, 40, 50, 55, 60, 65, 70, 75, 80, 90, or 100 years of age. In various embodiments the patient has a body weight of at least about 5, 10, 15, 20, 30, 40, 50, 60, 70, 80, 90, 100, 120, 140, 160, 180, 200, 220, 240, 260, 280, 300, 320, 340, 360, 380 or 400 lbs. In various embodiments, the patient has a body weight of no more than about 5, 10, 15, 20, 30, 40, 50, 60, 70, 80, 90, 100, 120, 140, 160, 180, 200, 220, 240, 260, 280, 300, 320, 340, 360, 380 or 400 lbs.

[0289] In various embodiments of the present disclosure, the dosage [measuring only the active ingredient(s)] can be at least about 1, 5, 10, 25, 50, 100, 200, 250, 300, 250, 400, 450, 500, 550, 600, 650, 700, 750, 800, 850, 900, 950 or 1000 ng, 1, 5, 10, 25, 50, 100, 200, 250, 300, 250, 400, 450, 500, 550, 600, 650, 700, 750, 800, 850, 900, 950 or 1000 micrograms, 1, 5, 10, 25, 50, 100, 200, 250, 300, 250, 400, 450, 500, 550, 600, 650, 700, 750, 800, 850, 900, 950 or 1000 mg. In various embodiments, the dosage can be no more than about 10, 25, 50, 100, 200, 250, 300, 250, 400, 450, 500, 550, 600, 650, 700, 750, 800, 850, 900, 950 or 1000 mg. In various embodiments, the dosage can be administered at least more than once a day, daily, more than once a weekly, weekly, bi-weekly, monthly, and/or every 2, 3, 4, 5, 6, 7, 8, 9, 10, 11 or 12 months, or a combination thereof.

[0290] In various embodiments, the dosage is correlated to the body weight or body surface area of the individual. The actual dosage level can be varied to obtain an amount of active agent which is effective for a particular patient, composition and mode of administration, without being toxic to the patient. The selected dose will depend on a variety of pharmacokinetic factors, including the activity of the particular RNAi agent employed, the route of administration, the rate of excretion of the RNAi agent, the duration of the treatment, other drugs, compounds and/or materials used in combination with the RNAi agent, the age, sex, weight, condition, general health and prior medical history of the patient, and like factors well known in the medical arts. A physician or veterinarian having ordinary skill in the art can readily determine the effective amount of the RNAi agent required. A suitable dose will be that amount which is the lowest dose effective to produce a therapeutic effect, or a dose low enough to produce a therapeutic effect without causing side effects.

RNAi Agents to KRAS in Combination with Other Therapies

[0291] In addition to a therapeutically-effective dosage of one or more RNAi agents to KRAS, the pharmaceutical compositions of the present disclosure can comprise or be used in conjunction with an additional disease treatment which works synergistically with the RNAi agent.

[0292] In addition, many tumors contain mutations in both KRAS and one or more other genes. For example, some lung cancer or colorectal tumor cells or other types of cancer can have mutations in both KRAS and one or more of: EGFR, GLUT1, PI3K, RAF, and APC. Haigis et al. 2008 Nature Gen. 40: 600-608; Karapetis et al. 2008 N.E.J. Med. 359: 1757-1765; and Yun et al. 2009 Science 325: 1555-1559. Effective combination therapy can comprise a KRAS RNAi agent combined with an agent which targets the other mutated hyper-active or overexpressed protein, or which is an approved therapy for the cancer type being treated.

[0293] RNAi agents to KRAS can thus be effective when used in a regimen involving other disease treatments. Some of these treatments are not effective when the patient has an activating mutation in KRAS. However, the RNAi agent to KRAS can reduce the overall amount of KRAS, improving the efficacy of disease treatments which are not effective in the presence of an activating KRAS mutation.

[0294] Furthermore, proliferation, survival and/or apoptosis resistance of KRAS-defective tumor cells may require another factor such as NF-kappa-B or I-kappa-B kinase TBK1. Meylan et al. 2009 Nature 462: 104-107; and Barbie et al. 2009 Nature 462: 108-112. Thus, in some embodiments, effective combination therapy can comprise administration of a KRAS RNAi agent and administration (or co-administration) of a treatment which targets the other factor (e.g., a siRNA, antibody or small molecule which targets NF-kappa-B or TBK1).

[0295] Thus, the KRAS RNAi agent can be used in a combination therapy along with any other therapeutic composition or method or therapy, including those which specifically target another factor, or which are otherwise known to be effective in treatment of a KRAS-related disease.

[0296] In the treatment of these KRAS-related diseases, the RNAi agent(s) and additional disease treatment(s) can be administered in any order, simultaneously or sequentially, or in multiple doses over time. Administration of the RNAi agent and the additional treatment can be, for example, simultaneous, concurrent, separate or sequential.

[0297] Simultaneous administration may, e.g., take place in the form of one fixed combination with two or more active ingredients, or by simultaneously administering two or more active ingredients that are formulated independently. Sequential use (administration) preferably means administration of one (or more) components of a combination at one time point, other components at a different time point, that is, in a chronically staggered manner, preferably such that the combination shows more efficiency than the single compounds administered independently (especially showing synergism). Separate use (administration) preferably means administration of the components of the combination independently of each other at different time points, preferably meaning that the components (a) and (b) are administered such that no overlap of significant measurable blood levels of both compounds are present in an overlapping manner (at the same time).

[0298] Also combinations of two or more of sequential, separate and simultaneous administration are possible, preferably such that the combination component-drugs show a joint therapeutic effect that exceeds the effect found when the combination component-drugs are used independently at time intervals so large that no mutual effect on their therapeutic efficiency can be found, a synergistic effect being especially preferred.

[0299] The term “delay of progression” as used herein means administration of the combination to patients being in a pre-stage or in an early phase, of the first manifestation or a relapse of the disease to be treated, in which patients, e.g., a pre-form of the corresponding disease is diagnosed or which patients are in a condition, e.g., during a medical treatment or a condition resulting from an accident, under which it is likely that a corresponding disease will develop.

[0300] “Jointly therapeutically active” or “joint therapeutic effect” means that the compounds may be given separately (in a chronically staggered manner, especially a sequence-specific manner) in such time intervals that they preferably, in the warm-blooded animal, especially human, to be treated, still show a (preferably synergistic) interaction (joint therapeutic effect). Whether this is the case, can inter alia be determined by following the blood levels, showing that both compounds are present in the blood of the human to be treated at least during certain time intervals.

[0301] The present disclosure thus encompasses a combination therapy comprising both a KRAS RNAi agent and one or more additional therapies for KRAS-related diseases known in the art.

[0302] The use of known treatments for any of KRAS-related diseases is within the capabilities of one of ordinary skill in the art. Any such additional treatment can be used in conjunction with a RNAi agent to KRAS.

[0303] The dosages of the additional treatments and RNAi agents can be easily determined by one of ordinary skill in the art, and as described herein.

### Embodiments Comprising One or More Efficacious RNAi Agents to KRAS

[0304] In various embodiments of the present disclosure, the present disclosure comprises a RNAi agent demonstrating at least about 40, 50, 60, 70, 80, 90 or 95% knockdown (KD) (i.e., no more than about 60, 50, 40, 30, 20, 10, or 5% residual gene activity, respectively) of the KRAS gene at an in vitro concentration of 10 or 0.1 nM as assayed in RKO cells.

[0305] In various embodiments of the present disclosure, the composition comprises one or more RNAi agents capable of a Fold-Change at 10 nM at 24 hr of <0.05, <0.10, <0.20, <0.30, <0.40 (indicating a KRAS gene knock-down of at least 95, 90, 80, 70, or 60%, respectively, at a concentration of 10 nM at 24 hrs in RKO cells). RNAi agents capable of these levels of activity are disclosed in the Tables herein.

### Embodiments Comprising One or More Efficacious RNAi Agents to KRAS

[0306] In various embodiments of the present disclosure, the composition comprises one or more RNAi agents capable of a Fold-Change at 0.1 nM at 120 hr of <0.30, <0.20, or <0.10 (indicating a KRAS gene knock-down of at least 70, 80, or 90%, respectively, at a concentration of 0.1 nM at 120 hrs in RKO cells). RNAi agents capable of these levels of activity are disclosed in the Tables herein.

Various Embodiments Comprising One or More RNAi Agents to KRAS with Low EC50

[0307] In various embodiments of the present disclosure, the composition comprises one or more RNAi agents capable of mediating a 50% gene knockdown (EC50) of KRAS at a low concentration in RKO cells. For many of the RNAi agents listed herein, an estimated EC50 is calculated. Cells are treated at 10 nM, 1 nM, 0.1 nM, 0.01 nM, and 0.001 nM of RNAi agent, and the data fit to a curve. The indicated EC50 is an estimated EC50 calculated from available data that is expected to give 50% gene knock-down of KRAS in RKO cells. In various embodiments of the present disclosure, the composition comprises one or more RNAi agents capable of mediating a 50% gene knockdown (EC50) at 100, 75, 50, 25, 10, 5, 2.5, 1, 0.75, 0.5, 0.25, 0.2, 0.12, 0.1, 0.09, 0.08, 0.07, 0.06, 0.05, 0.04, 0.03, or 0.02 nM or less in RKO cells. RNAi agents capable of these levels of activity are disclosed in the Tables herein.

### Specific Embodiments of RNAi Agents to KRAS

[0308] In one embodiment, the present disclosure pertains to: a composition comprising any one or more of: a RNAi agent comprising a sense strand and an anti-sense strand, wherein the anti-sense strand comprises at least 15 contiguous nucleotides differing by 0, 1, 2, or 3 nucleotides from the anti-sense strand of: any RNAi agent from any of Tables 1 to 6 and modified or unmodified variants thereof.

[0309] In one embodiment, the composition comprises any one or more of: a RNAi agent comprising a sense strand and an anti-sense strand, wherein the anti-sense strand comprises at least 15 contiguous nucleotides differing by 0 nucleotides from the anti-sense strand of any RNAi agent from any of Tables 1 to 6, and modified and unmodified variants thereof.

[0310] In one embodiment, the present disclosure pertains to a composition comprising any one or more of: any RNAi agent from any of Tables 1 to 6, and modified and unmodified variants thereof.

[0311] In one embodiment, the present disclosure pertains to a composition comprising any one or more of: a RNAi agent comprising an anti-sense strand comprising the sequence of the anti-sense strand of any RNAi agent from any of Tables 1 to 6, and modified and unmodified variants thereof.

[0312] In one embodiment, the present disclosure pertains to a composition comprising any one or more of: a RNAi agent comprises an anti-sense strand consisting of the sequence of the anti-sense strand of any RNAi agent from any of Tables 1 to 6, and modified and unmodified variants thereof.

[0313] In one embodiment, the present disclosure pertains to a composition comprising any one or more of: a RNAi agent comprising a first strand and a second strand, wherein the sequence of the first strand is the second of the first strand of any RNAi agent from any of Tables 1 to 6, and modified and unmodified variants thereof.

[0314] In one embodiment, the present disclosure pertains to a composition comprising any one or more of: a RNAi agent comprising a first and a second strand, wherein the sequences of the first and the second strand are the sequences of the first and second strand of any RNAi agent from any of Tables 1 to 6, and modified and unmodified variants thereof.

[0315] In one embodiment, the present disclosure pertains to a composition comprising any one or more of: a RNAi agent comprising a first strand and a second strand, wherein the sequence of the first strand is the second of the first strand of any RNAi agent from any of Tables 1 to 6, and modified and unmodified variants thereof, wherein the first and/or second strand further comprise up to about 20 additional nucleotides.

### Specific Embodiments of RNAi Agents to KRAS

[0316] In one embodiment, the present disclosure pertains to: a composition comprising any one or more of: a RNAi agent comprising a first strand and a second strand, wherein the first strand comprises at least 15 contiguous nucleotides differing by 0, 1, 2, or 3 nucleotides from the first strand of: any RNAi agent from any of Tables 1 to 6 or modified or unmodified variants thereof.

[0317] In one embodiment, the present disclosure pertains to: a composition comprising any one or more of: a RNAi agent comprising a first strand and a second strand, wherein the first strand comprises at least 15 contiguous nucleotides from the first strand of any RNAi agent from any of Tables 1 to 6, or modified and unmodified variants thereof.

[0318] In one embodiment, the present disclosure pertains to a composition comprising any one or more of: a RNAi agent comprising a first strand and a second strand, wherein the sequence of the first strand is the sequence of a first strand of any RNAi agent from any of Tables 1 to 6, or modified and unmodified variants thereof.

[0319] In one embodiment, the present disclosure pertains to a composition comprising any one or more of: a RNAi agent comprising a first and a second strand, wherein the sequences of the first and/or second strands comprise the sequences of a first and/or second strands of any RNAi agent from any of Tables 1 to 6, or modified and unmodified variants thereof.

[0320] In one embodiment, the present disclosure pertains to a composition comprising any one or more of: a RNAi agent comprising a first and a second strand, wherein the sequences of the first and the second strand are the sequences of the first and second strand of any RNAi agent from any of Tables 1 to 6, or modified and unmodified variants thereof.

[0321] In one embodiment, the present disclosure pertains to a composition comprising any one or more of: a RNAi agent comprising a first and a second strand, wherein the sequence of the first and/or second strand is the sequence of a first and/or second strand of any RNAi agent from any of Tables 1 to 6, or modified and unmodified variants thereof, wherein the first and/or second strand further comprise up to about 20 additional nucleotides.

Specific Embodiments Comprising at Least 15 Contiguous Nucleotides Differing from 0 to 3 nt from RNAi Agents Disclosed Herein

[0322] In one embodiment, the present disclosure pertains to: a composition comprising any one or more of: a RNAi agent comprising a first and a second strand, wherein the first strand comprises at least 15 contiguous nucleotides (nt) differing by 0, 1, 2, or 3 nt from a first strand of: any RNAi agent from any of Tables 1 to 6 or modified or unmodified variants thereof.

[0323] Thus, in various embodiments, the present disclosure pertains to a composition comprising any one or more of the following:

[0324] A RNAi agent comprising a first and a second strand, wherein the first strand comprises at least 15 contiguous nt differing by 0, 1, 2, or 3 nt from a first strand of: AD-35523.3 (SEQ ID NO: 428), or a modified or unmodified variant thereof.

[0325] A RNAi agent comprising a first and a second strand, wherein the first strand comprises at least 15 contiguous nt differing by 0, 1, 2, or 3 nt from a first strand of: AD-35529.1 (SEQ ID NO: 429), or a modified or unmodified variant thereof.

[0326] A RNAi agent comprising a first and a second strand, wherein the first strand comprises at least 15 contiguous nt differing by 0, 1, 2, or 3 nt from a first strand of: AD-35535.4 (SEQ ID NO: 430), or a modified or unmodified variant thereof.

[0327] A RNAi agent comprising a first and a second strand, wherein the first strand comprises at least 15 contiguous nt differing by 0, 1, 2, or 3 nt from a first strand of: AD-35541.4 (SEQ ID NO: 431), or a modified or unmodified variant thereof.

[0328] A RNAi agent comprising a first and a second strand, wherein the first strand comprises at least 15 contiguous nt differing by 0, 1, 2, or 3 nt from a first strand of: AD-35547.4 (SEQ ID NO: 432), or a modified or unmodified variant thereof.

[0329] A RNAi agent comprising a first and a second strand, wherein the first strand comprises at least 15 contiguous nt differing by 0, 1, 2, or 3 nt from a first strand of: AD-35553.4 (SEQ ID NO: 433), or a modified or unmodified variant thereof.

[0330] A RNAi agent comprising a first and a second strand, wherein the first strand comprises at least 15 contiguous nt differing by 0, 1, 2, or 3 nt from a first strand of: AD-35559.4 (SEQ ID NO: 434), or a modified or unmodified variant thereof.

[0331] A RNAi agent comprising a first and a second strand, wherein the first strand comprises at least 15 contiguous nt differing by 0, 1, 2, or 3 nt from a first strand of: AD-35565.4 (SEQ ID NO: 435), or a modified or unmodified variant thereof.

[0332] A RNAi agent comprising a first and a second strand, wherein the first strand comprises at least 15 contiguous nt differing by 0, 1, 2, or 3 nt from a first strand of: AD-35524.4 (SEQ ID NO: 436), or a modified or unmodified variant thereof.

[0333] A RNAi agent comprising a first and a second strand, wherein the first strand comprises at least 15 contiguous nt differing by 0, 1, 2, or 3 nt from a first strand of: AD-35530.4 (SEQ ID NO: 437), or a modified or unmodified variant thereof.

[0334] A RNAi agent comprising a first and a second strand, wherein the first strand comprises at least 15 contiguous nt differing by 0, 1, 2, or 3 nt from a first strand of: AD-35536.4 (SEQ ID NO: 438), or a modified or unmodified variant thereof.

[0335] A RNAi agent comprising a first and a second strand, wherein the first strand comprises at least 15 contiguous nt differing by 0, 1, 2, or 3 nt from a first strand of: AD-35542.4 (SEQ ID NO: 439), or a modified or unmodified variant thereof.

[0336] A RNAi agent comprising a first and a second strand, wherein the first strand comprises at least 15 contiguous nt differing by 0, 1, 2, or 3 nt from a first strand of: AD-35548.4 (SEQ ID NO: 440), or a modified or unmodified variant thereof.

[0337] A RNAi agent comprising a first and a second strand, wherein the first strand comprises at least 15 contiguous nt differing by 0, 1, 2, or 3 nt from a first strand of: AD-35554.4 (SEQ ID NO: 441), or a modified or unmodified variant thereof.

[0338] A RNAi agent comprising a first and a second strand, wherein the first strand comprises at least 15 contiguous nt differing by 0, 1, 2, or 3 nt from a first strand of: AD-35560.2 (SEQ ID NO: 442), or a modified or unmodified variant thereof.

[0339] A RNAi agent comprising a first and a second strand, wherein the first strand comprises at least 15 contiguous nt differing by 0, 1, 2, or 3 nt from a first strand of: AD-35566.4 (SEQ ID NO: 443), or a modified or unmodified variant thereof.

[0340] A RNAi agent comprising a first and a second strand, wherein the first strand comprises at least 15 contiguous nt differing by 0, 1, 2, or 3 nt from a first strand of: AD-35525.2 (SEQ ID NO: 444), or a modified or unmodified variant thereof.

[0341] A RNAi agent comprising a first and a second strand, wherein the first strand comprises at least 15 contiguous nt differing by 0, 1, 2, or 3 nt from a first strand of: AD-35531.4 (SEQ ID NO: 445), or a modified or unmodified variant thereof.

[0342] A RNAi agent comprising a first and a second strand, wherein the first strand comprises at least 15 contiguous nt differing by 0, 1, 2, or 3 nt from a first strand of: AD-35537.4 (SEQ ID NO: 446), or a modified or unmodified variant thereof.

[0343] A RNAi agent comprising a first and a second strand, wherein the first strand comprises at least 15 contiguous nt differing by 0, 1, 2, or 3 nt from a first strand of: AD-35543.2 (SEQ ID NO: 447), or a modified or unmodified variant thereof.

[0344] A RNAi agent comprising a first and a second strand, wherein the first strand comprises at least 15 contiguous nt differing by 0, 1, 2, or 3 nt from a first strand of: AD-35549.4 (SEQ ID NO: 448), or a

[0345] A RNAi agent comprising a first and a second strand, wherein the first strand comprises at least 15 contiguous nt differing by 0, 1, 2, or 3 nt from a first strand of: AD-35555.4 (SEQ ID NO: 449), or a modified or unmodified variant thereof.

[0346] A RNAi agent comprising a first and a second strand, wherein the first strand comprises at least 15 contiguous nt differing by 0, 1, 2, or 3 nt from a first strand of: AD-35561.4 (SEQ ID NO: 450), or a modified or unmodified variant thereof.

[0347] A RNAi agent comprising a first and a second strand, wherein the first strand comprises at least 15 contiguous nt differing by 0, 1, 2, or 3 nt from a first strand of: AD-35567.4 (SEQ ID NO: 451), or a modified or unmodified variant thereof.

[0348] A RNAi agent comprising a first and a second strand, wherein the first strand comprises at least 15 contiguous nt differing by 0, 1, 2, or 3 nt from a first strand of: AD-35526.4 (SEQ ID NO: 452), or a modified or unmodified variant thereof.

[0349] A RNAi agent comprising a first and a second strand, wherein the first strand comprises at least 15 contiguous nt differing by 0, 1, 2, or 3 nt from a first strand of: AD-35532.4 (SEQ ID NO: 453), or a modified or unmodified variant thereof.

[0350] A RNAi agent comprising a first and a second strand, wherein the first strand comprises at least 15 contiguous nt differing by 0, 1, 2, or 3 nt from a first strand of: AD-35538.4 (SEQ ID NO: 454), or a modified or unmodified variant thereof.

[0351] A RNAi agent comprising a first and a second strand, wherein the first strand comprises at least 15 contiguous nt differing by 0, 1, 2, or 3 nt from a first strand of: AD-35544.4 (SEQ ID NO: 455), or a modified or unmodified variant thereof.

[0352] A RNAi agent comprising a first and a second strand, wherein the first strand comprises at least 15 contiguous nt differing by 0, 1, 2, or 3 nt from a first strand of: AD-35550.4 (SEQ ID NO: 456), or a modified or unmodified variant thereof.

[0353] A RNAi agent comprising a first and a second strand, wherein the first strand comprises at least 15 contiguous nt differing by 0, 1, 2, or 3 nt from a first strand of: AD-35556.4 (SEQ ID NO: 457), or a modified or unmodified variant thereof.

[0354] A RNAi agent comprising a first and a second strand, wherein the first strand comprises at least 15 contiguous nt differing by 0, 1, 2, or 3 nt from a first strand of: AD-35562.4 (SEQ ID NO: 458), or a modified or unmodified variant thereof.

[0355] A RNAi agent comprising a first and a second strand, wherein the first strand comprises at least 15 contiguous nt differing by 0, 1, 2, or 3 nt from a first strand of: AD-35568.4 (SEQ ID NO: 459), or a modified or unmodified variant thereof.

[0356] A RNAi agent comprising a first and a second strand, wherein the first strand comprises at least 15 contiguous nt differing by 0, 1, 2, or 3 nt from a first strand of: AD-35527.4 (SEQ ID NO: 460), or a modified or unmodified variant thereof.

[0357] A RNAi agent comprising a first and a second strand, wherein the first strand comprises at least 15 contiguous nt differing by 0, 1, 2, or 3 nt from a first strand of: AD-35533.4 (SEQ ID NO: 461), or a modified or unmodified variant thereof.

[0358] A RNAi agent comprising a first and a second strand, wherein the first strand comprises at least 15 contiguous nt differing by 0, 1, 2, or 3 nt from a first strand of: AD-35539.4 (SEQ ID NO: 462), or a modified or unmodified variant thereof.

[0359] A RNAi agent comprising a first and a second strand, wherein the first strand comprises at least 15 contiguous nt differing by 0, 1, 2, or 3 nt from a first strand of: AD-35545.4 (SEQ ID NO: 463), or a modified or unmodified variant thereof.

[0360] A RNAi agent comprising a first and a second strand, wherein the first strand comprises at least 15 contiguous nt differing by 0, 1, 2, or 3 nt from a first strand of: AD-35551.4 (SEQ ID NO: 464), or a modified or unmodified variant thereof.

[0361] A RNAi agent comprising a first and a second strand, wherein the first strand comprises at least 15 contiguous nt differing by 0, 1, 2, or 3 nt from a first strand of: AD-35563.4 (SEQ ID NO: 465), or a modified or unmodified variant thereof.

[0362] A RNAi agent comprising a first and a second strand, wherein the first strand comprises at least 15 contiguous nt differing by 0, 1, 2, or 3 nt from a first strand of: AD-35528.4 (SEQ ID NO: 466), or a modified or unmodified variant thereof.

[0363] A RNAi agent comprising a first and a second strand, wherein the first strand comprises at least 15 contiguous nt differing by 0, 1, 2, or 3 nt from a first strand of: AD-35540.4 (SEQ ID NO: 467), or a modified or unmodified variant thereof.

[0364] A RNAi agent comprising a first and a second strand, wherein the first strand comprises at least 15 contiguous nt differing by 0, 1, 2, or 3 nt from a first strand of: AD-35546.4 (SEQ ID NO: 468), or a modified or unmodified variant thereof.

[0365] A RNAi agent comprising a first and a second strand, wherein the first strand comprises at least 15 contiguous nt differing by 0, 1, 2, or 3 nt from a first strand of: AD-35552.4 (SEQ ID NO: 469), or a modified or unmodified variant thereof.

[0366] A RNAi agent comprising a first and a second strand, wherein the first strand comprises at least 15 contiguous nt differing by 0, 1, 2, or 3 nt from a first strand of: AD-35558.4 (SEQ ID NO: 470), or a modified or unmodified variant thereof.

[0367] A RNAi agent comprising a first and a second strand, wherein the first strand comprises at least 15 contiguous nt differing by 0, 1, 2, or 3 nt from a first strand of: AD-35564.4 (SEQ ID NO: 471), or a modified or unmodified variant thereof.

[0368] A RNAi agent comprising a first and a second strand, wherein the first strand comprises at least 15 contiguous nt differing by 0, 1, 2, or 3 nt from a first strand of: AD-35570.4 (SEQ ID NO: 472), or a modified or unmodified variant thereof.

[0369] A RNAi agent comprising a first and a second strand, wherein the first strand comprises at least 15 contiguous nt differing by 0, 1, 2, or 3 nt from a first strand of: AD-35571.4 (SEQ ID NO: 473), or a modified or unmodified variant thereof.

[0370] A RNAi agent comprising a first and a second strand, wherein the first strand comprises at least 15 contiguous nt differing by 0, 1, 2, or 3 nt from a first strand of: AD-35577.4 (SEQ ID NO: 474), or a modified or unmodified variant thereof.

[0371] A RNAi agent comprising a first and a second strand, wherein the first strand comprises at least 15 contiguous nt differing by 0, 1, 2, or 3 nt from a first strand of: AD-35583.4 (SEQ ID NO: 475), or a modified or unmodified variant thereof.

[0372] A RNAi agent comprising a first and a second strand, wherein the first strand comprises at least 15 contiguous nt differing by 0, 1, 2, or 3 nt from a first strand of: AD-35589.4 (SEQ ID NO: 476), or a modified or unmodified variant thereof.

[0373] A RNAi agent comprising a first and a second strand, wherein the first strand comprises at least 15 contiguous nt differing by 0, 1, 2, or 3 nt from a first strand of: AD-35595.4 (SEQ ID NO: 477), or a modified or unmodified variant thereof.

[0374] A RNAi agent comprising a first and a second strand, wherein the first strand comprises at least 15 contiguous nt differing by 0, 1, 2, or 3 nt from a first strand of: AD-35601.4 (SEQ ID NO: 478), or a modified or unmodified variant thereof.

[0375] A RNAi agent comprising a first and a second strand, wherein the first strand comprises at least 15 contiguous nt differing by 0, 1, 2, or 3 nt from a first strand of: AD-35607.4 (SEQ ID NO: 479), or a modified or unmodified variant thereof.

[0376] A RNAi agent comprising a first and a second strand, wherein the first strand comprises at least 15 contiguous nt differing by 0, 1, 2, or 3 nt from a first strand of: AD-35613.4 (SEQ ID NO: 480), or a modified or unmodified variant thereof.

[0377] A RNAi agent comprising a first and a second strand, wherein the first strand comprises at least 15 contiguous nt differing by 0, 1, 2, or 3 nt from a first strand of: AD-35572.4 (SEQ ID NO: 481), or a modified or unmodified variant thereof.

[0378] A RNAi agent comprising a first and a second strand, wherein the first strand comprises at least 15 contiguous nt differing by 0, 1, 2, or 3 nt from a first strand of: AD-35578.4 (SEQ ID NO: 482), or a modified or unmodified variant thereof.

[0379] A RNAi agent comprising a first and a second strand, wherein the first strand comprises at least 15 contiguous nt differing by 0, 1, 2, or 3 nt from a first strand of: AD-35584.4 (SEQ ID NO: 483), or a modified or unmodified variant thereof.

[0380] A RNAi agent comprising a first and a second strand, wherein the first strand comprises at least 15 contiguous nt differing by 0, 1, 2, or 3 nt from a first strand of: AD-35590.4 (SEQ ID NO: 484), or a modified or unmodified variant thereof.

[0381] A RNAi agent comprising a first and a second strand, wherein the first strand comprises at least 15 contiguous nt differing by 0, 1, 2, or 3 nt from a first strand of: AD-35596.4 (SEQ ID NO: 485), or a modified or unmodified variant thereof.

[0382] A RNAi agent comprising a first and a second strand, wherein the first strand comprises at least 15 contiguous nt differing by 0, 1, 2, or 3 nt from a first strand of: AD-35602.4 (SEQ ID NO: 486), or a modified or unmodified variant thereof.

[0383] A RNAi agent comprising a first and a second strand, wherein the first strand comprises at least 15 contiguous nt differing by 0, 1, 2, or 3 nt from a first strand of: AD-35608.4 (SEQ ID NO: 487), or a modified or unmodified variant thereof.

[0384] A RNAi agent comprising a first and a second strand, wherein the first strand comprises at least 15 contiguous nt differing by 0, 1, 2, or 3 nt from a first strand of: AD-35614.4 (SEQ ID NO: 488), or a

[0385] A RNAi agent comprising a first and a second strand, wherein the first strand comprises at least 15 contiguous nt differing by 0, 1, 2, or 3 nt from a first strand of: AD-35573.4 (SEQ ID NO: 489), or a modified or unmodified variant thereof.

[0386] A RNAi agent comprising a first and a second strand, wherein the first strand comprises at least 15 contiguous nt differing by 0, 1, 2, or 3 nt from a first strand of: AD-35579.4 (SEQ ID NO: 490), or a modified or unmodified variant thereof.

[0387] A RNAi agent comprising a first and a second strand, wherein the first strand comprises at least 15 contiguous nt differing by 0, 1, 2, or 3 nt from a first strand of: AD-35585.4 (SEQ ID NO: 491), or a modified or unmodified variant thereof.

[0388] A RNAi agent comprising a first and a second strand, wherein the first strand comprises at least 15 contiguous nt differing by 0, 1, 2, or 3 nt from a first strand of: AD-35591.4 (SEQ ID NO: 492), or a modified or unmodified variant thereof.

[0389] A RNAi agent comprising a first and a second strand, wherein the first strand comprises at least 15 contiguous nt differing by 0, 1, 2, or 3 nt from a first strand of: AD-35597.4 (SEQ ID NO: 493), or a modified or unmodified variant thereof.

[0390] A RNAi agent comprising a first and a second strand, wherein the first strand comprises at least 15 contiguous nt differing by 0, 1, 2, or 3 nt from a first strand of: AD-35603.4 (SEQ ID NO: 494), or a modified or unmodified variant thereof.

[0391] A RNAi agent comprising a first and a second strand, wherein the first strand comprises at least 15 contiguous nt differing by 0, 1, 2, or 3 nt from a first strand of: AD-35609.4 (SEQ ID NO: 495), or a modified or unmodified variant thereof.

[0392] A RNAi agent comprising a first and a second strand, wherein the first strand comprises at least 15 contiguous nt differing by 0, 1, 2, or 3 nt from a first strand of: AD-35615.4 (SEQ ID NO: 496), or a modified or unmodified variant thereof.

[0393] A RNAi agent comprising a first and a second strand, wherein the first strand comprises at least 15 contiguous nt differing by 0, 1, 2, or 3 nt from a first strand of: AD-35574.4 (SEQ ID NO: 497), or a modified or unmodified variant thereof.

[0394] A RNAi agent comprising a first and a second strand, wherein the first strand comprises at least 15 contiguous nt differing by 0, 1, 2, or 3 nt from a first strand of: AD-35580.1 (SEQ ID NO: 498), or a modified or unmodified variant thereof.

[0395] A RNAi agent comprising a first and a second strand, wherein the first strand comprises at least 15 contiguous nt differing by 0, 1, 2, or 3 nt from a first strand of: AD-35586.4 (SEQ ID NO: 499), or a modified or unmodified variant thereof.

[0396] A RNAi agent comprising a first and a second strand, wherein the first strand comprises at least 15 contiguous nt differing by 0, 1, 2, or 3 nt from a first strand of: AD-35592.4 (SEQ ID NO: 500), or a modified or unmodified variant thereof.

[0397] A RNAi agent comprising a first and a second strand, wherein the first strand comprises at least 15 contiguous nt differing by 0, 1, 2, or 3 nt from a first strand of: AD-35598.4 (SEQ ID NO: 501), or a modified or unmodified variant thereof.

[0398] A RNAi agent comprising a first and a second strand, wherein the first strand comprises at least 15 contiguous nt differing by 0, 1, 2, or 3 nt from a first strand of: AD-35604.4 (SEQ ID NO: 502), or a modified or unmodified variant thereof.

[0399] A RNAi agent comprising a first and a second strand, wherein the first strand comprises at least 15 contiguous nt differing by 0, 1, 2, or 3 nt from a first strand of: AD-35610.4 (SEQ ID NO: 503), or a modified or unmodified variant thereof.

[0400] A RNAi agent comprising a first and a second strand, wherein the first strand comprises at least 15 contiguous nt differing by 0, 1, 2, or 3 nt from a first strand of: AD-35616.4 (SEQ ID NO: 504), or a modified or unmodified variant thereof.

[0401] A RNAi agent comprising a first and a second strand, wherein the first strand comprises at least 15 contiguous nt differing by 0, 1, 2, or 3 nt from a first strand of: AD-35575.4 (SEQ ID NO: 505), or a modified or unmodified variant thereof.

[0402] A RNAi agent comprising a first and a second strand, wherein the first strand comprises at least 15 contiguous nt differing by 0, 1, 2, or 3 nt from a first strand of: AD-35581.4 (SEQ ID NO: 506), or a modified or unmodified variant thereof.

[0403] A RNAi agent comprising a first and a second strand, wherein the first strand comprises at least 15 contiguous nt differing by 0, 1, 2, or 3 nt from a first strand of: AD-35587.4 (SEQ ID NO: 507), or a modified or unmodified variant thereof.

[0404] A RNAi agent comprising a first and a second strand, wherein the first strand comprises at least 15 contiguous nt differing by 0, 1, 2, or 3 nt from a first strand of: AD-35593.4 (SEQ ID NO: 508), or a modified or unmodified variant thereof.

[0405] A RNAi agent comprising a first and a second strand, wherein the first strand comprises at least 15 contiguous nt differing by 0, 1, 2, or 3 nt from a first strand of: AD-35599.4 (SEQ ID NO: 509), or a modified or unmodified variant thereof.

[0406] A RNAi agent comprising a first and a second strand, wherein the first strand comprises at least 15 contiguous nt differing by 0, 1, 2, or 3 nt from a first strand of: AD-35605.4 (SEQ ID NO: 510), or a modified or unmodified variant thereof.

[0407] A RNAi agent comprising a first and a second strand, wherein the first strand comprises at least 15 contiguous nt differing by 0, 1, 2, or 3 nt from a first strand of: AD-35611.4 (SEQ ID NO: 511), or a modified or unmodified variant thereof.

[0408] A RNAi agent comprising a first and a second strand, wherein the first strand comprises at least 15 contiguous nt differing by 0, 1, 2, or 3 nt from a first strand of: AD-35617.4 (SEQ ID NO: 512), or a modified or unmodified variant thereof.

[0409] A RNAi agent comprising a first and a second strand, wherein the first strand comprises at least 15 contiguous nt differing by 0, 1, 2, or 3 nt from a first strand of: AD-35576.4 (SEQ ID NO: 513), or a modified or unmodified variant thereof.

[0410] A RNAi agent comprising a first and a second strand, wherein the first strand comprises at least 15 contiguous nt differing by 0, 1, 2, or 3 nt from a first strand of: AD-35588.4 (SEQ ID NO: 514), or a modified or unmodified variant thereof.

[0411] A RNAi agent comprising a first and a second strand, wherein the first strand comprises at least 15 contiguous nt differing by 0, 1, 2, or 3 nt from a first strand of: AD-35667.1 (SEQ ID NO: 515), or a modified or unmodified variant thereof.

[0412] A RNAi agent comprising a first and a second strand, wherein the first strand comprises at least 15 contiguous nt differing by 0, 1, 2, or 3 nt from a first strand of: AD-35673.1 (SEQ ID NO: 516), or a modified or unmodified variant thereof.

[0413] A RNAi agent comprising a first and a second strand, wherein the first strand comprises at least 15 contiguous nt differing by 0, 1, 2, or 3 nt from a first strand of: AD-35679.1 (SEQ ID NO: 517), or a modified or unmodified variant thereof.

[0414] A RNAi agent comprising a first and a second strand, wherein the first strand comprises at least 15 contiguous nt differing by 0, 1, 2, or 3 nt from a first strand of: AD-35685.1 (SEQ ID NO: 518), or a modified or unmodified variant thereof.

[0415] A RNAi agent comprising a first and a second strand, wherein the first strand comprises at least 15 contiguous nt differing by 0, 1, 2, or 3 nt from a first strand of: AD-35691.1 (SEQ ID NO: 519), or a modified or unmodified variant thereof.

[0416] A RNAi agent comprising a first and a second strand, wherein the first strand comprises at least 15 contiguous nt differing by 0, 1, 2, or 3 nt from a first strand of: AD-35557.1 (SEQ ID NO: 520), or a modified or unmodified variant thereof.

[0417] A RNAi agent comprising a first and a second strand, wherein the first strand comprises at least 15 contiguous nt differing by 0, 1, 2, or 3 nt from a first strand of: AD-35618.1 (SEQ ID NO: 521), or a modified or unmodified variant thereof.

[0418] A RNAi agent comprising a first and a second strand, wherein the first strand comprises at least 15 contiguous nt differing by 0, 1, 2, or 3 nt from a first strand of: AD-35569.1 (SEQ ID NO: 522), or a modified or unmodified variant thereof.

[0419] A RNAi agent comprising a first and a second strand, wherein the first strand comprises at least 15 contiguous nt differing by 0, 1, 2, or 3 nt from a first strand of: AD-35534.1 (SEQ ID NO: 523), or a modified or unmodified variant thereof.

[0420] A RNAi agent comprising a first and a second strand, wherein the first strand comprises at least 15 contiguous nt differing by 0, 1, 2, or 3 nt from a first strand of: AD-35582.1 (SEQ ID NO: 524), or a modified or unmodified variant thereof.

[0421] A RNAi agent comprising a first and a second strand, wherein the first strand comprises at least 15 contiguous nt differing by 0, 1, 2, or 3 nt from a first strand of: AD-35594.1 (SEQ ID NO: 525), or a modified or unmodified variant thereof.

[0422] A RNAi agent comprising a first and a second strand, wherein the first strand comprises at least 15 contiguous nt differing by 0, 1, 2, or 3 nt from a first strand of: AD-35600.1 (SEQ ID NO: 526), or a modified or unmodified variant thereof.

[0423] A RNAi agent comprising a first and a second strand, wherein the first strand comprises at least 15 contiguous nt differing by 0, 1, 2, or 3 nt from a first strand of: AD-35606.1 (SEQ ID NO: 527), or a modified or unmodified variant thereof.

[0424] A RNAi agent comprising a first and a second strand, wherein the first strand comprises at least 15 contiguous nt differing by 0, 1, 2, or 3 nt from a first strand of: AD-35612.1 (SEQ ID NO: 528), or a

[0425] A RNAi agent comprising a first and a second strand, wherein the first strand comprises at least 15 contiguous nt differing by 0, 1, 2, or 3 nt from a first strand of: AD-38127.1 (SEQ ID NO: 529), or a modified or unmodified variant thereof.

[0426] A RNAi agent comprising a first and a second strand, wherein the first strand comprises at least 15 contiguous nt differing by 0, 1, 2, or 3 nt from a first strand of: AD-38133.1 (SEQ ID NO: 530), or a modified or unmodified variant thereof.

[0427] A RNAi agent comprising a first and a second strand, wherein the first strand comprises at least 15 contiguous nt differing by 0, 1, 2, or 3 nt from a first strand of: AD-38139.1 (SEQ ID NO: 531), or a modified or unmodified variant thereof.

[0428] A RNAi agent comprising a first and a second strand, wherein the first strand comprises at least 15 contiguous nt differing by 0, 1, 2, or 3 nt from a first strand of: AD-38145.1 (SEQ ID NO: 532), or a modified or unmodified variant thereof.

[0429] A RNAi agent comprising a first and a second strand, wherein the first strand comprises at least 15 contiguous nt differing by 0, 1, 2, or 3 nt from a first strand of: AD-38151.1 (SEQ ID NO: 533), or a modified or unmodified variant thereof.

[0430] A RNAi agent comprising a first and a second strand, wherein the first strand comprises at least 15 contiguous nt differing by 0, 1, 2, or 3 nt from a first strand of: AD-38157.1 (SEQ ID NO: 534), or a modified or unmodified variant thereof.

[0431] A RNAi agent comprising a first and a second strand, wherein the first strand comprises at least 15 contiguous nt differing by 0, 1, 2, or 3 nt from a first strand of: AD-38163.1 (SEQ ID NO: 535), or a modified or unmodified variant thereof.

[0432] A RNAi agent comprising a first and a second strand, wherein the first strand comprises at least 15 contiguous nt differing by 0, 1, 2, or 3 nt from a first strand of: AD-38169.1 (SEQ ID NO: 536), or a modified or unmodified variant thereof.

[0433] A RNAi agent comprising a first and a second strand, wherein the first strand comprises at least 15 contiguous nt differing by 0, 1, 2, or 3 nt from a first strand of: AD-38128.1 (SEQ ID NO: 537), or a modified or unmodified variant thereof.

[0434] A RNAi agent comprising a first and a second strand, wherein the first strand comprises at least 15 contiguous nt differing by 0, 1, 2, or 3 nt from a first strand of: AD-38134.1 (SEQ ID NO: 538), or a modified or unmodified variant thereof.

[0435] A RNAi agent comprising a first and a second strand, wherein the first strand comprises at least 15 contiguous nt differing by 0, 1, 2, or 3 nt from a first strand of: AD-38140.1 (SEQ ID NO: 539), or a modified or unmodified variant thereof.

[0436] A RNAi agent comprising a first and a second strand, wherein the first strand comprises at least 15 contiguous nt differing by 0, 1, 2, or 3 nt from a first strand of: AD-38146.1 (SEQ ID NO: 540), or a modified or unmodified variant thereof.

[0437] A RNAi agent comprising a first and a second strand, wherein the first strand comprises at least 15 contiguous nt differing by 0, 1, 2, or 3 nt from a first strand of: AD-38152.1 (SEQ ID NO: 541), or a modified or unmodified variant thereof.

[0438] A RNAi agent comprising a first and a second strand, wherein the first strand comprises at least 15 contiguous nt differing by 0, 1, 2, or 3 nt from a first strand of: AD-38158.1 (SEQ ID NO: 542), or a modified or unmodified variant thereof.

[0439] A RNAi agent comprising a first and a second strand, wherein the first strand comprises at least 15 contiguous nt differing by 0, 1, 2, or 3 nt from a first strand of: AD-38164.1 (SEQ ID NO: 543), or a modified or unmodified variant thereof.

[0440] A RNAi agent comprising a first and a second strand, wherein the first strand comprises at least 15 contiguous nt differing by 0, 1, 2, or 3 nt from a first strand of: AD-38170.1 (SEQ ID NO: 544), or a modified or unmodified variant thereof.

[0441] A RNAi agent comprising a first and a second strand, wherein the first strand comprises at least 15 contiguous nt differing by 0, 1, 2, or 3 nt from a first strand of: AD-38129.1 (SEQ ID NO: 545), or a modified or unmodified variant thereof.

[0442] A RNAi agent comprising a first and a second strand, wherein the first strand comprises at least 15 contiguous nt differing by 0, 1, 2, or 3 nt from a first strand of: AD-38135.1 (SEQ ID NO: 546), or a modified or unmodified variant thereof.

[0443] A RNAi agent comprising a first and a second strand, wherein the first strand comprises at least 15 contiguous nt differing by 0, 1, 2, or 3 nt from a first strand of: AD-38141.1 (SEQ ID NO: 547), or a modified or unmodified variant thereof.

[0444] A RNAi agent comprising a first and a second strand, wherein the first strand comprises at least 15 contiguous nt differing by 0, 1, 2, or 3 nt from a first strand of: AD-38147.1 (SEQ ID NO: 548), or a modified or unmodified variant thereof.

[0445] A RNAi agent comprising a first and a second strand, wherein the first strand comprises at least 15 contiguous nt differing by 0, 1, 2, or 3 nt from a first strand of: AD-38153.1 (SEQ ID NO: 549), or a modified or unmodified variant thereof.

[0446] A RNAi agent comprising a first and a second strand, wherein the first strand comprises at least 15 contiguous nt differing by 0, 1, 2, or 3 nt from a first strand of: AD-38159.1 (SEQ ID NO: 550), or a modified or unmodified variant thereof.

[0447] A RNAi agent comprising a first and a second strand, wherein the first strand comprises at least 15 contiguous nt differing by 0, 1, 2, or 3 nt from a first strand of: AD-38165.1 (SEQ ID NO: 551), or a modified or unmodified variant thereof.

[0448] A RNAi agent comprising a first and a second strand, wherein the first strand comprises at least 15 contiguous nt differing by 0, 1, 2, or 3 nt from a first strand of: AD-38171.1 (SEQ ID NO: 552), or a modified or unmodified variant thereof.

[0449] A RNAi agent comprising a first and a second strand, wherein the first strand comprises at least 15 contiguous nt differing by 0, 1, 2, or 3 nt from a first strand of: AD-38130.1 (SEQ ID NO: 553), or a modified or unmodified variant thereof.

[0450] A RNAi agent comprising a first and a second strand, wherein the first strand comprises at least 15 contiguous nt differing by 0, 1, 2, or 3 nt from a first strand of: AD-38136.1 (SEQ ID NO: 554), or a modified or unmodified variant thereof.

[0451] A RNAi agent comprising a first and a second strand, wherein the first strand comprises at least 15 contiguous nt differing by 0, 1, 2, or 3 nt from a first strand of: AD-38142.1 (SEQ ID NO: 555), or a modified or unmodified variant thereof.

[0452] A RNAi agent comprising a first and a second strand, wherein the first strand comprises at least 15 contiguous nt differing by 0, 1, 2, or 3 nt from a first strand of: AD-38148.1 (SEQ ID NO: 556), or a modified or unmodified variant thereof.

[0453] A RNAi agent comprising a first and a second strand, wherein the first strand comprises at least 15 contiguous nt differing by 0, 1, 2, or 3 nt from a first strand of: AD-38154.1 (SEQ ID NO: 557), or a modified or unmodified variant thereof.

[0454] A RNAi agent comprising a first and a second strand, wherein the first strand comprises at least 15 contiguous nt differing by 0, 1, 2, or 3 nt from a first strand of: AD-38160.1 (SEQ ID NO: 558), or a modified or unmodified variant thereof.

[0455] A RNAi agent comprising a first and a second strand, wherein the first strand comprises at least 15 contiguous nt differing by 0, 1, 2, or 3 nt from a first strand of: AD-38166.1 (SEQ ID NO: 559), or a modified or unmodified variant thereof.

[0456] A RNAi agent comprising a first and a second strand, wherein the first strand comprises at least 15 contiguous nt differing by 0, 1, 2, or 3 nt from a first strand of: AD-38172.1 (SEQ ID NO: 560), or a modified or unmodified variant thereof.

[0457] A RNAi agent comprising a first and a second strand, wherein the first strand comprises at least 15 contiguous nt differing by 0, 1, 2, or 3 nt from a first strand of: AD-38131.1 (SEQ ID NO: 561), or a modified or unmodified variant thereof.

[0458] A RNAi agent comprising a first and a second strand, wherein the first strand comprises at least 15 contiguous nt differing by 0, 1, 2, or 3 nt from a first strand of: AD-38137.1 (SEQ ID NO: 562), or a modified or unmodified variant thereof.

[0459] A RNAi agent comprising a first and a second strand, wherein the first strand comprises at least 15 contiguous nt differing by 0, 1, 2, or 3 nt from a first strand of: AD-38143.1 (SEQ ID NO: 563), or a modified or unmodified variant thereof.

[0460] A RNAi agent comprising a first and a second strand, wherein the first strand comprises at least 15 contiguous nt differing by 0, 1, 2, or 3 nt from a first strand of: AD-38149.1 (SEQ ID NO: 564), or a modified or unmodified variant thereof.

[0461] A RNAi agent comprising a first and a second strand, wherein the first strand comprises at least 15 contiguous nt differing by 0, 1, 2, or 3 nt from a first strand of: AD-38155.1 (SEQ ID NO: 565), or a modified or unmodified variant thereof.

[0462] A RNAi agent comprising a first and a second strand, wherein the first strand comprises at least 15 contiguous nt differing by 0, 1, 2, or 3 nt from a first strand of: AD-38161.1 (SEQ ID NO: 566), or a modified or unmodified variant thereof.

[0463] A RNAi agent comprising a first and a second strand, wherein the first strand comprises at least 15 contiguous nt differing by 0, 1, 2, or 3 nt from a first strand of: AD-38167.1 (SEQ ID NO: 567), or a modified or unmodified variant thereof.

[0464] A RNAi agent comprising a first and a second strand, wherein the first strand comprises at least 15 contiguous nt differing by 0, 1, 2, or 3 nt from a first strand of: AD-38173.1 (SEQ ID NO: 568), or a

[0465] A RNAi agent comprising a first and a second strand, wherein the first strand comprises at least 15 contiguous nt differing by 0, 1, 2, or 3 nt from a first strand of: AD-38132.1 (SEQ ID NO: 569), or a modified or unmodified variant thereof.

[0466] A RNAi agent comprising a first and a second strand, wherein the first strand comprises at least 15 contiguous nt differing by 0, 1, 2, or 3 nt from a first strand of: AD-38138.1 (SEQ ID NO: 570), or a modified or unmodified variant thereof.

[0467] A RNAi agent comprising a first and a second strand, wherein the first strand comprises at least 15 contiguous nt differing by 0, 1, 2, or 3 nt from a first strand of: AD-38144.1 (SEQ ID NO: 571), or a modified or unmodified variant thereof.

[0468] A RNAi agent comprising a first and a second strand, wherein the first strand comprises at least 15 contiguous nt differing by 0, 1, 2, or 3 nt from a first strand of: AD-38150.1 (SEQ ID NO: 572), or a modified or unmodified variant thereof.

[0469] A RNAi agent comprising a first and a second strand, wherein the first strand comprises at least 15 contiguous nt differing by 0, 1, 2, or 3 nt from a first strand of: AD-38156.1 (SEQ ID NO: 573), or a modified or unmodified variant thereof.

[0470] A RNAi agent comprising a first and a second strand, wherein the first strand comprises at least 15 contiguous nt differing by 0, 1, 2, or 3 nt from a first strand of: AD-38162.1 (SEQ ID NO: 574), or a modified or unmodified variant thereof.

[0471] A RNAi agent comprising a first and a second strand, wherein the first strand comprises at least 15 contiguous nt differing by 0, 1, 2, or 3 nt from a first strand of: AD-38168.1 (SEQ ID NO: 575), or a modified or unmodified variant thereof.

[0472] A RNAi agent comprising a first and a second strand, wherein the first strand comprises at least 15 contiguous nt differing by 0, 1, 2, or 3 nt from a first strand of: AD-38174.1 (SEQ ID NO: 576), or a modified or unmodified variant thereof.

[0473] A RNAi agent comprising a first and a second strand, wherein the first strand comprises at least 15 contiguous nt differing by 0, 1, 2, or 3 nt from a first strand of: AD-39683.1 (SEQ ID NO: 577), or a modified or unmodified variant thereof.

[0474] A RNAi agent comprising a first and a second strand, wherein the first strand comprises at least 15 contiguous nt differing by 0, 1, 2, or 3 nt from a first strand of: AD-39689.1 (SEQ ID NO: 578), or a modified or unmodified variant thereof.

[0475] A RNAi agent comprising a first and a second strand, wherein the first strand comprises at least 15 contiguous nt differing by 0, 1, 2, or 3 nt from a first strand of: AD-39695.1 (SEQ ID NO: 579), or a modified or unmodified variant thereof.

[0476] A RNAi agent comprising a first and a second strand, wherein the first strand comprises at least 15 contiguous nt differing by 0, 1, 2, or 3 nt from a first strand of: AD-39701.1 (SEQ ID NO: 580), or a modified or unmodified variant thereof.

[0477] A RNAi agent comprising a first and a second strand, wherein the first strand comprises at least 15 contiguous nt differing by 0, 1, 2, or 3 nt from a first strand of: AD-39707.1 (SEQ ID NO: 581), or a modified or unmodified variant thereof.

[0478] A RNAi agent comprising a first and a second strand, wherein the first strand comprises at least 15 contiguous nt differing by 0, 1, 2, or 3 nt from a first strand of: AD-39713.1 (SEQ ID NO: 582), or a modified or unmodified variant thereof.

[0479] A RNAi agent comprising a first and a second strand, wherein the first strand comprises at least 15 contiguous nt differing by 0, 1, 2, or 3 nt from a first strand of: AD-39719.1 (SEQ ID NO: 583), or a modified or unmodified variant thereof.

[0480] A RNAi agent comprising a first and a second strand, wherein the first strand comprises at least 15 contiguous nt differing by 0, 1, 2, or 3 nt from a first strand of: AD-39725.1 (SEQ ID NO: 584), or a modified or unmodified variant thereof.

[0481] A RNAi agent comprising a first and a second strand, wherein the first strand comprises at least 15 contiguous nt differing by 0, 1, 2, or 3 nt from a first strand of: AD-39684.1 (SEQ ID NO: 585), or a modified or unmodified variant thereof.

[0482] A RNAi agent comprising a first and a second strand, wherein the first strand comprises at least 15 contiguous nt differing by 0, 1, 2, or 3 nt from a first strand of: AD-39690.1 (SEQ ID NO: 586), or a modified or unmodified variant thereof.

[0483] A RNAi agent comprising a first and a second strand, wherein the first strand comprises at least 15 contiguous nt differing by 0, 1, 2, or 3 nt from a first strand of: AD-39696.1 (SEQ ID NO: 587), or a modified or unmodified variant thereof.

[0484] A RNAi agent comprising a first and a second strand, wherein the first strand comprises at least 15 contiguous nt differing by 0, 1, 2, or 3 nt from a first strand of: AD-39702.1 (SEQ ID NO: 588), or a modified or unmodified variant thereof.

[0485] A RNAi agent comprising a first and a second strand, wherein the first strand comprises at least 15 contiguous nt differing by 0, 1, 2, or 3 nt from a first strand of: AD-39708.1 (SEQ ID NO: 589), or a modified or unmodified variant thereof.

[0486] A RNAi agent comprising a first and a second strand, wherein the first strand comprises at least 15 contiguous nt differing by 0, 1, 2, or 3 nt from a first strand of: AD-39714.1 (SEQ ID NO: 590), or a modified or unmodified variant thereof.

[0487] A RNAi agent comprising a first and a second strand, wherein the first strand comprises at least 15 contiguous nt differing by 0, 1, 2, or 3 nt from a first strand of: AD-39720.1 (SEQ ID NO: 591), or a modified or unmodified variant thereof.

[0488] A RNAi agent comprising a first and a second strand, wherein the first strand comprises at least 15 contiguous nt differing by 0, 1, 2, or 3 nt from a first strand of: AD-39726.1 (SEQ ID NO: 592), or a modified or unmodified variant thereof.

[0489] A RNAi agent comprising a first and a second strand, wherein the first strand comprises at least 15 contiguous nt differing by 0, 1, 2, or 3 nt from a first strand of: AD-39685.1 (SEQ ID NO: 593), or a modified or unmodified variant thereof.

[0490] A RNAi agent comprising a first and a second strand, wherein the first strand comprises at least 15 contiguous nt differing by 0, 1, 2, or 3 nt from a first strand of: AD-39691.1 (SEQ ID NO: 594), or a modified or unmodified variant thereof.

[0491] A RNAi agent comprising a first and a second strand, wherein the first strand comprises at least 15 contiguous nt differing by 0, 1, 2, or 3 nt from a first strand of: AD-39697.1 (SEQ ID NO: 595), or a modified or unmodified variant thereof.

[0492] A RNAi agent comprising a first and a second strand, wherein the first strand comprises at least 15 contiguous nt differing by 0, 1, 2, or 3 nt from a first strand of: AD-39703.1 (SEQ ID NO: 596), or a modified or unmodified variant thereof.

[0493] A RNAi agent comprising a first and a second strand, wherein the first strand comprises at least 15 contiguous nt differing by 0, 1, 2, or 3 nt from a first strand of: AD-39709.1 (SEQ ID NO: 597), or a modified or unmodified variant thereof.

[0494] A RNAi agent comprising a first and a second strand, wherein the first strand comprises at least 15 contiguous nt differing by 0, 1, 2, or 3 nt from a first strand of: AD-39715.1 (SEQ ID NO: 598), or a modified or unmodified variant thereof.

[0495] A RNAi agent comprising a first and a second strand, wherein the first strand comprises at least 15 contiguous nt differing by 0, 1, 2, or 3 nt from a first strand of: AD-39721.1 (SEQ ID NO: 599), or a modified or unmodified variant thereof.

[0496] A RNAi agent comprising a first and a second strand, wherein the first strand comprises at least 15 contiguous nt differing by 0, 1, 2, or 3 nt from a first strand of: AD-39727.1 (SEQ ID NO: 600), or a modified or unmodified variant thereof.

[0497] A RNAi agent comprising a first and a second strand, wherein the first strand comprises at least 15 contiguous nt differing by 0, 1, 2, or 3 nt from a first strand of: AD-39686.1 (SEQ ID NO: 601), or a modified or unmodified variant thereof.

[0498] A RNAi agent comprising a first and a second strand, wherein the first strand comprises at least 15 contiguous nt differing by 0, 1, 2, or 3 nt from a first strand of: AD-39692.1 (SEQ ID NO: 602), or a modified or unmodified variant thereof.

[0499] A RNAi agent comprising a first and a second strand, wherein the first strand comprises at least 15 contiguous nt differing by 0, 1, 2, or 3 nt from a first strand of: AD-39698.1 (SEQ ID NO: 603), or a modified or unmodified variant thereof.

[0500] A RNAi agent comprising a first and a second strand, wherein the first strand comprises at least 15 contiguous nt differing by 0, 1, 2, or 3 nt from a first strand of: AD-39704.1 (SEQ ID NO: 604), or a modified or unmodified variant thereof.

[0501] A RNAi agent comprising a first and a second strand, wherein the first strand comprises at least 15 contiguous nt differing by 0, 1, 2, or 3 nt from a first strand of: AD-39710.1 (SEQ ID NO: 605), or a modified or unmodified variant thereof.

[0502] A RNAi agent comprising a first and a second strand, wherein the first strand comprises at least 15 contiguous nt differing by 0, 1, 2, or 3 nt from a first strand of: AD-39716.1 (SEQ ID NO: 606), or a modified or unmodified variant thereof.

[0503] A RNAi agent comprising a first and a second strand, wherein the first strand comprises at least 15 contiguous nt differing by 0, 1, 2, or 3 nt from a first strand of: AD-39722.1 (SEQ ID NO: 607), or a modified or unmodified variant thereof.

[0504] A RNAi agent comprising a first and a second strand, wherein the first strand comprises at least 15 contiguous nt differing by 0, 1, 2, or 3 nt from a first strand of: AD-39728.1 (SEQ ID NO: 608), or a

[0505] A RNAi agent comprising a first and a second strand, wherein the first strand comprises at least 15 contiguous nt differing by 0, 1, 2, or 3 nt from a first strand of: AD-39687.1 (SEQ ID NO: 609), or a modified or unmodified variant thereof.

[0506] A RNAi agent comprising a first and a second strand, wherein the first strand comprises at least 15 contiguous nt differing by 0, 1, 2, or 3 nt from a first strand of: AD-39693.1 (SEQ ID NO: 610), or a modified or unmodified variant thereof.

[0507] A RNAi agent comprising a first and a second strand, wherein the first strand comprises at least 15 contiguous nt differing by 0, 1, 2, or 3 nt from a first strand of: AD-39699.1 (SEQ ID NO: 611), or a modified or unmodified variant thereof.

[0508] A RNAi agent comprising a first and a second strand, wherein the first strand comprises at least 15 contiguous nt differing by 0, 1, 2, or 3 nt from a first strand of: AD-39705.1 (SEQ ID NO: 612), or a modified or unmodified variant thereof.

[0509] A RNAi agent comprising a first and a second strand, wherein the first strand comprises at least 15 contiguous nt differing by 0, 1, 2, or 3 nt from a first strand of: AD-39711.1 (SEQ ID NO: 613), or a modified or unmodified variant thereof.

[0510] A RNAi agent comprising a first and a second strand, wherein the first strand comprises at least 15 contiguous nt differing by 0, 1, 2, or 3 nt from a first strand of: AD-39717.1 (SEQ ID NO: 614), or a modified or unmodified variant thereof.

[0511] A RNAi agent comprising a first and a second strand, wherein the first strand comprises at least 15 contiguous nt differing by 0, 1, 2, or 3 nt from a first strand of: AD-39723.1 (SEQ ID NO: 615), or a modified or unmodified variant thereof.

[0512] A RNAi agent comprising a first and a second strand, wherein the first strand comprises at least 15 contiguous nt differing by 0, 1, 2, or 3 nt from a first strand of: AD-39729.1 (SEQ ID NO: 616), or a modified or unmodified variant thereof.

[0513] A RNAi agent comprising a first and a second strand, wherein the first strand comprises at least 15 contiguous nt differing by 0, 1, 2, or 3 nt from a first strand of: AD-39688.1 (SEQ ID NO: 617), or a modified or unmodified variant thereof.

[0514] A RNAi agent comprising a first and a second strand, wherein the first strand comprises at least 15 contiguous nt differing by 0, 1, 2, or 3 nt from a first strand of: AD-39694.1 (SEQ ID NO: 618), or a modified or unmodified variant thereof.

[0515] A RNAi agent comprising a first and a second strand, wherein the first strand comprises at least 15 contiguous nt differing by 0, 1, 2, or 3 nt from a first strand of: AD-39700.1 (SEQ ID NO: 619), or a modified or unmodified variant thereof.

[0516] A RNAi agent comprising a first and a second strand, wherein the first strand comprises at least 15 contiguous nt differing by 0, 1, 2, or 3 nt from a first strand of: AD-39706.1 (SEQ ID NO: 620), or a modified or unmodified variant thereof.

[0517] A RNAi agent comprising a first and a second strand, wherein the first strand comprises at least 15 contiguous nt differing by 0, 1, 2, or 3 nt from a first strand of: AD-39712.1 (SEQ ID NO: 621), or a modified or unmodified variant thereof.

[0518] A RNAi agent comprising a first and a second strand, wherein the first strand comprises at least 15 contiguous nt differing by 0, 1, 2, or 3 nt from a first strand of: AD-39718.1 (SEQ ID NO: 622), or a modified or unmodified variant thereof.

[0519] A RNAi agent comprising a first and a second strand, wherein the first strand comprises at least 15 contiguous nt differing by 0, 1, 2, or 3 nt from a first strand of: AD-39724.1 (SEQ ID NO: 623), or a modified or unmodified variant thereof.

[0520] A RNAi agent comprising a first and a second strand, wherein the first strand comprises at least 15 contiguous nt differing by 0, 1, 2, or 3 nt from a first strand of: AD-39730.1 (SEQ ID NO: 624), or a modified or unmodified variant thereof.

[0521] A RNAi agent comprising a first and a second strand, wherein the first strand comprises at least 15 contiguous nt differing by 0, 1, 2, or 3 nt from a first strand of: AD-39736.1 (SEQ ID NO: 625), or a modified or unmodified variant thereof.

[0522] A RNAi agent comprising a first and a second strand, wherein the first strand comprises at least 15 contiguous nt differing by 0, 1, 2, or 3 nt from a first strand of: AD-39742.1 (SEQ ID NO: 626), or a modified or unmodified variant thereof.

[0523] A RNAi agent comprising a first and a second strand, wherein the first strand comprises at least 15 contiguous nt differing by 0, 1, 2, or 3 nt from a first strand of: AD-39748.1 (SEQ ID NO: 627), or a modified or unmodified variant thereof.

[0524] A RNAi agent comprising a first and a second strand, wherein the first strand comprises at least 15 contiguous nt differing by 0, 1, 2, or 3 nt from a first strand of: AD-39754.1 (SEQ ID NO: 628), or a modified or unmodified variant thereof.

[0525] A RNAi agent comprising a first and a second strand, wherein the first strand comprises at least 15 contiguous nt differing by 0, 1, 2, or 3 nt from a first strand of: AD-39760.1 (SEQ ID NO: 629), or a modified or unmodified variant thereof.

[0526] A RNAi agent comprising a first and a second strand, wherein the first strand comprises at least 15 contiguous nt differing by 0, 1, 2, or 3 nt from a first strand of: AD-39766.1 (SEQ ID NO: 630), or a modified or unmodified variant thereof.

[0527] A RNAi agent comprising a first and a second strand, wherein the first strand comprises at least 15 contiguous nt differing by 0, 1, 2, or 3 nt from a first strand of: AD-39772.1 (SEQ ID NO: 631), or a modified or unmodified variant thereof.

[0528] A RNAi agent comprising a first and a second strand, wherein the first strand comprises at least 15 contiguous nt differing by 0, 1, 2, or 3 nt from a first strand of: AD-39731.1 (SEQ ID NO: 632), or a modified or unmodified variant thereof.

[0529] A RNAi agent comprising a first and a second strand, wherein the first strand comprises at least 15 contiguous nt differing by 0, 1, 2, or 3 nt from a first strand of: AD-39737.1 (SEQ ID NO: 633), or a modified or unmodified variant thereof.

[0530] A RNAi agent comprising a first and a second strand, wherein the first strand comprises at least 15 contiguous nt differing by 0, 1, 2, or 3 nt from a first strand of: AD-39743.1 (SEQ ID NO: 634), or a modified or unmodified variant thereof.

[0531] A RNAi agent comprising a first and a second strand, wherein the first strand comprises at least 15 contiguous nt differing by 0, 1, 2, or 3 nt from a first strand of: AD-39749.1 (SEQ ID NO: 635), or a modified or unmodified variant thereof.

[0532] A RNAi agent comprising a first and a second strand, wherein the first strand comprises at least 15 contiguous nt differing by 0, 1, 2, or 3 nt from a first strand of: AD-39755.1 (SEQ ID NO: 636), or a modified or unmodified variant thereof.

[0533] A RNAi agent comprising a first and a second strand, wherein the first strand comprises at least 15 contiguous nt differing by 0, 1, 2, or 3 nt from a first strand of: AD-39761.1 (SEQ ID NO: 637), or a modified or unmodified variant thereof.

[0534] A RNAi agent comprising a first and a second strand, wherein the first strand comprises at least 15 contiguous nt differing by 0, 1, 2, or 3 nt from a first strand of: AD-39767.1 (SEQ ID NO: 638), or a modified or unmodified variant thereof.

[0535] A RNAi agent comprising a first and a second strand, wherein the first strand comprises at least 15 contiguous nt differing by 0, 1, 2, or 3 nt from a first strand of: AD-39773.1 (SEQ ID NO: 639), or a modified or unmodified variant thereof.

[0536] A RNAi agent comprising a first and a second strand, wherein the first strand comprises at least 15 contiguous nt differing by 0, 1, 2, or 3 nt from a first strand of: AD-39732.1 (SEQ ID NO: 640), or a modified or unmodified variant thereof.

[0537] A RNAi agent comprising a first and a second strand, wherein the first strand comprises at least 15 contiguous nt differing by 0, 1, 2, or 3 nt from a first strand of: AD-39738.1 (SEQ ID NO: 641), or a modified or unmodified variant thereof.

[0538] A RNAi agent comprising a first and a second strand, wherein the first strand comprises at least 15 contiguous nt differing by 0, 1, 2, or 3 nt from a first strand of: AD-39744.1 (SEQ ID NO: 642), or a modified or unmodified variant thereof.

[0539] A RNAi agent comprising a first and a second strand, wherein the first strand comprises at least 15 contiguous nt differing by 0, 1, 2, or 3 nt from a first strand of: AD-39750.1 (SEQ ID NO: 643), or a modified or unmodified variant thereof.

[0540] A RNAi agent comprising a first and a second strand, wherein the first strand comprises at least 15 contiguous nt differing by 0, 1, 2, or 3 nt from a first strand of: AD-39756.1 (SEQ ID NO: 644), or a modified or unmodified variant thereof.

[0541] A RNAi agent comprising a first and a second strand, wherein the first strand comprises at least 15 contiguous nt differing by 0, 1, 2, or 3 nt from a first strand of: AD-39762.1 (SEQ ID NO: 645), or a modified or unmodified variant thereof.

[0542] A RNAi agent comprising a first and a second strand, wherein the first strand comprises at least 15 contiguous nt differing by 0, 1, 2, or 3 nt from a first strand of: AD-39768.1 (SEQ ID NO: 646), or a modified or unmodified variant thereof.

[0543] A RNAi agent comprising a first and a second strand, wherein the first strand comprises at least 15 contiguous nt differing by 0, 1, 2, or 3 nt from a first strand of: AD-39774.1 (SEQ ID NO: 647), or a modified or unmodified variant thereof.

[0544] A RNAi agent comprising a first and a second strand, wherein the first strand comprises at least 15 contiguous nt differing by 0, 1, 2, or 3 nt from a first strand of: AD-39733.1 (SEQ ID NO: 648), or a

[0545] A RNAi agent comprising a first and a second strand, wherein the first strand comprises at least 15 contiguous nt differing by 0, 1, 2, or 3 nt from a first strand of: AD-39739.1 (SEQ ID NO: 649), or a modified or unmodified variant thereof.

[0546] A RNAi agent comprising a first and a second strand, wherein the first strand comprises at least 15 contiguous nt differing by 0, 1, 2, or 3 nt from a first strand of: AD-39745.1 (SEQ ID NO: 650), or a modified or unmodified variant thereof.

[0547] A RNAi agent comprising a first and a second strand, wherein the first strand comprises at least 15 contiguous nt differing by 0, 1, 2, or 3 nt from a first strand of: AD-39751.1 (SEQ ID NO: 651), or a modified or unmodified variant thereof.

[0548] A RNAi agent comprising a first and a second strand, wherein the first strand comprises at least 15 contiguous nt differing by 0, 1, 2, or 3 nt from a first strand of: AD-39757.1 (SEQ ID NO: 652), or a modified or unmodified variant thereof.

[0549] A RNAi agent comprising a first and a second strand, wherein the first strand comprises at least 15 contiguous nt differing by 0, 1, 2, or 3 nt from a first strand of: AD-39763.1 (SEQ ID NO: 653), or a modified or unmodified variant thereof.

[0550] A RNAi agent comprising a first and a second strand, wherein the first strand comprises at least 15 contiguous nt differing by 0, 1, 2, or 3 nt from a first strand of: AD-39769.1 (SEQ ID NO: 654), or a modified or unmodified variant thereof.

[0551] A RNAi agent comprising a first and a second strand, wherein the first strand comprises at least 15 contiguous nt differing by 0, 1, 2, or 3 nt from a first strand of: AD-39775.1 (SEQ ID NO: 655), or a modified or unmodified variant thereof.

[0552] A RNAi agent comprising a first and a second strand, wherein the first strand comprises at least 15 contiguous nt differing by 0, 1, 2, or 3 nt from a first strand of: AD-39734.1 (SEQ ID NO: 656), or a modified or unmodified variant thereof.

[0553] A RNAi agent comprising a first and a second strand, wherein the first strand comprises at least 15 contiguous nt differing by 0, 1, 2, or 3 nt from a first strand of: AD-39740.1 (SEQ ID NO: 657), or a modified or unmodified variant thereof.

[0554] A RNAi agent comprising a first and a second strand, wherein the first strand comprises at least 15 contiguous nt differing by 0, 1, 2, or 3 nt from a first strand of: AD-39746.1 (SEQ ID NO: 658), or a modified or unmodified variant thereof.

[0555] A RNAi agent comprising a first and a second strand, wherein the first strand comprises at least 15 contiguous nt differing by 0, 1, 2, or 3 nt from a first strand of: AD-39752.1 (SEQ ID NO: 659), or a modified or unmodified variant thereof.

[0556] A RNAi agent comprising a first and a second strand, wherein the first strand comprises at least 15 contiguous nt differing by 0, 1, 2, or 3 nt from a first strand of: AD-39758.1 (SEQ ID NO: 660), or a modified or unmodified variant thereof.

[0557] A RNAi agent comprising a first and a second strand, wherein the first strand comprises at least 15 contiguous nt differing by 0, 1, 2, or 3 nt from a first strand of: AD-39764.1 (SEQ ID NO: 661), or a modified or unmodified variant thereof.

[0558] A RNAi agent comprising a first and a second strand, wherein the first strand comprises at least 15 contiguous nt differing by 0, 1, 2, or 3 nt from a first strand of: AD-39770.1 (SEQ ID NO: 662), or a modified or unmodified variant thereof.

[0559] A RNAi agent comprising a first and a second strand, wherein the first strand comprises at least 15 contiguous nt differing by 0, 1, 2, or 3 nt from a first strand of: AD-39776.1 (SEQ ID NO: 663), or a modified or unmodified variant thereof.

[0560] A RNAi agent comprising a first and a second strand, wherein the first strand comprises at least 15 contiguous nt differing by 0, 1, 2, or 3 nt from a first strand of: AD-39735.1 (SEQ ID NO: 664), or a modified or unmodified variant thereof.

[0561] A RNAi agent comprising a first and a second strand, wherein the first strand comprises at least 15 contiguous nt differing by 0, 1, 2, or 3 nt from a first strand of: AD-39741.1 (SEQ ID NO: 665), or a modified or unmodified variant thereof.

[0562] A RNAi agent comprising a first and a second strand, wherein the first strand comprises at least 15 contiguous nt differing by 0, 1, 2, or 3 nt from a first strand of: AD-39747.1 (SEQ ID NO: 666), or a modified or unmodified variant thereof.

[0563] A RNAi agent comprising a first and a second strand, wherein the first strand comprises at least 15 contiguous nt differing by 0, 1, 2, or 3 nt from a first strand of: AD-39753.1 (SEQ ID NO: 667), or a modified or unmodified variant thereof.

[0564] A RNAi agent comprising a first and a second strand, wherein the first strand comprises at least 15 contiguous nt differing by 0, 1, 2, or 3 nt from a first strand of: AD-39759.1 (SEQ ID NO: 668), or a modified or unmodified variant thereof.

[0565] A RNAi agent comprising a first and a second strand, wherein the first strand comprises at least 15 contiguous nt differing by 0, 1, 2, or 3 nt from a first strand of: AD-39765.1 (SEQ ID NO: 669), or a modified or unmodified variant thereof.

[0566] A RNAi agent comprising a first and a second strand, wherein the first strand comprises at least 15 contiguous nt differing by 0, 1, 2, or 3 nt from a first strand of: AD-39771.1 (SEQ ID NO: 670), or a modified or unmodified variant thereof.

[0567] A RNAi agent comprising a first and a second strand, wherein the first strand comprises at least 15 contiguous nt differing by 0, 1, 2, or 3 nt from a first strand of: AD-39778.1 (SEQ ID NO: 671), or a modified or unmodified variant thereof.

[0568] A RNAi agent comprising a first and a second strand, wherein the first strand comprises at least 15 contiguous nt differing by 0, 1, 2, or 3 nt from a first strand of: AD-39784.1 (SEQ ID NO: 672), or a modified or unmodified variant thereof.

[0569] A RNAi agent comprising a first and a second strand, wherein the first strand comprises at least 15 contiguous nt differing by 0, 1, 2, or 3 nt from a first strand of: AD-39790.1 (SEQ ID NO: 673), or a modified or unmodified variant thereof.

[0570] A RNAi agent comprising a first and a second strand, wherein the first strand comprises at least 15 contiguous nt differing by 0, 1, 2, or 3 nt from a first strand of: AD-39796.1 (SEQ ID NO: 674), or a modified or unmodified variant thereof.

[0571] A RNAi agent comprising a first and a second strand, wherein the first strand comprises at least 15 contiguous nt differing by 0, 1, 2, or 3 nt from a first strand of: AD-39802.1 (SEQ ID NO: 675), or a modified or unmodified variant thereof.

[0572] A RNAi agent comprising a first and a second strand, wherein the first strand comprises at least 15 contiguous nt differing by 0, 1, 2, or 3 nt from a first strand of: AD-39808.1 (SEQ ID NO: 676), or a modified or unmodified variant thereof.

[0573] A RNAi agent comprising a first and a second strand, wherein the first strand comprises at least 15 contiguous nt differing by 0, 1, 2, or 3 nt from a first strand of: AD-39814.1 (SEQ ID NO: 677), or a modified or unmodified variant thereof.

[0574] A RNAi agent comprising a first and a second strand, wherein the first strand comprises at least 15 contiguous nt differing by 0, 1, 2, or 3 nt from a first strand of: AD-39820.1 (SEQ ID NO: 678), or a modified or unmodified variant thereof.

[0575] A RNAi agent comprising a first and a second strand, wherein the first strand comprises at least 15 contiguous nt differing by 0, 1, 2, or 3 nt from a first strand of: AD-39779.1 (SEQ ID NO: 679), or a modified or unmodified variant thereof.

[0576] A RNAi agent comprising a first and a second strand, wherein the first strand comprises at least 15 contiguous nt differing by 0, 1, 2, or 3 nt from a first strand of: AD-39785.1 (SEQ ID NO: 680), or a modified or unmodified variant thereof.

[0577] A RNAi agent comprising a first and a second strand, wherein the first strand comprises at least 15 contiguous nt differing by 0, 1, 2, or 3 nt from a first strand of: AD-39791.1 (SEQ ID NO: 681), or a modified or unmodified variant thereof.

[0578] A RNAi agent comprising a first and a second strand, wherein the first strand comprises at least 15 contiguous nt differing by 0, 1, 2, or 3 nt from a first strand of: AD-39797.1 (SEQ ID NO: 682), or a modified or unmodified variant thereof.

[0579] A RNAi agent comprising a first and a second strand, wherein the first strand comprises at least 15 contiguous nt differing by 0, 1, 2, or 3 nt from a first strand of: AD-39803.1 (SEQ ID NO: 683), or a modified or unmodified variant thereof.

[0580] A RNAi agent comprising a first and a second strand, wherein the first strand comprises at least 15 contiguous nt differing by 0, 1, 2, or 3 nt from a first strand of: AD-39809.1 (SEQ ID NO: 684), or a modified or unmodified variant thereof.

[0581] A RNAi agent comprising a first and a second strand, wherein the first strand comprises at least 15 contiguous nt differing by 0, 1, 2, or 3 nt from a first strand of: AD-39815.1 (SEQ ID NO: 685), or a modified or unmodified variant thereof.

[0582] A RNAi agent comprising a first and a second strand, wherein the first strand comprises at least 15 contiguous nt differing by 0, 1, 2, or 3 nt from a first strand of: AD-39821.1 (SEQ ID NO: 686), or a modified or unmodified variant thereof.

[0583] A RNAi agent comprising a first and a second strand, wherein the first strand comprises at least 15 contiguous nt differing by 0, 1, 2, or 3 nt from a first strand of: AD-39780.1 (SEQ ID NO: 687), or a modified or unmodified variant thereof.

[0584] A RNAi agent comprising a first and a second strand, wherein the first strand comprises at least 15 contiguous nt differing by 0, 1, 2, or 3 nt from a first strand of: AD-39786.1 (SEQ ID NO: 688), or a

[0585] A RNAi agent comprising a first and a second strand, wherein the first strand comprises at least 15 contiguous nt differing by 0, 1, 2, or 3 nt from a first strand of: AD-39792.1 (SEQ ID NO: 689), or a modified or unmodified variant thereof.

[0586] A RNAi agent comprising a first and a second strand, wherein the first strand comprises at least 15 contiguous nt differing by 0, 1, 2, or 3 nt from a first strand of: AD-39798.1 (SEQ ID NO: 690), or a modified or unmodified variant thereof.

[0587] A RNAi agent comprising a first and a second strand, wherein the first strand comprises at least 15 contiguous nt differing by 0, 1, 2, or 3 nt from a first strand of: AD-39804.1 (SEQ ID NO: 691), or a modified or unmodified variant thereof.

[0588] A RNAi agent comprising a first and a second strand, wherein the first strand comprises at least 15 contiguous nt differing by 0, 1, 2, or 3 nt from a first strand of: AD-39810.1 (SEQ ID NO: 692), or a modified or unmodified variant thereof.

[0589] A RNAi agent comprising a first and a second strand, wherein the first strand comprises at least 15 contiguous nt differing by 0, 1, 2, or 3 nt from a first strand of: AD-39816.1 (SEQ ID NO: 693), or a modified or unmodified variant thereof.

[0590] A RNAi agent comprising a first and a second strand, wherein the first strand comprises at least 15 contiguous nt differing by 0, 1, 2, or 3 nt from a first strand of: AD-39822.1 (SEQ ID NO: 694), or a modified or unmodified variant thereof.

[0591] A RNAi agent comprising a first and a second strand, wherein the first strand comprises at least 15 contiguous nt differing by 0, 1, 2, or 3 nt from a first strand of: AD-39781.1 (SEQ ID NO: 695), or a modified or unmodified variant thereof.

[0592] A RNAi agent comprising a first and a second strand, wherein the first strand comprises at least 15 contiguous nt differing by 0, 1, 2, or 3 nt from a first strand of: AD-39787.1 (SEQ ID NO: 696), or a modified or unmodified variant thereof.

[0593] A RNAi agent comprising a first and a second strand, wherein the first strand comprises at least 15 contiguous nt differing by 0, 1, 2, or 3 nt from a first strand of: AD-39793.1 (SEQ ID NO: 697), or a modified or unmodified variant thereof.

[0594] A RNAi agent comprising a first and a second strand, wherein the first strand comprises at least 15 contiguous nt differing by 0, 1, 2, or 3 nt from a first strand of: AD-39799.1 (SEQ ID NO: 698), or a modified or unmodified variant thereof.

[0595] A RNAi agent comprising a first and a second strand, wherein the first strand comprises at least 15 contiguous nt differing by 0, 1, 2, or 3 nt from a first strand of: AD-39805.1 (SEQ ID NO: 699), or a modified or unmodified variant thereof.

[0596] A RNAi agent comprising a first and a second strand, wherein the first strand comprises at least 15 contiguous nt differing by 0, 1, 2, or 3 nt from a first strand of: AD-39811.1 (SEQ ID NO: 700), or a modified or unmodified variant thereof.

[0597] A RNAi agent comprising a first and a second strand, wherein the first strand comprises at least 15 contiguous nt differing by 0, 1, 2, or 3 nt from a first strand of: AD-39817.1 (SEQ ID NO: 701), or a modified or unmodified variant thereof.

[0598] A RNAi agent comprising a first and a second strand, wherein the first strand comprises at least 15 contiguous nt differing by 0, 1, 2, or 3 nt from a first strand of: AD-39823.1 (SEQ ID NO: 702), or a modified or unmodified variant thereof.

[0599] A RNAi agent comprising a first and a second strand, wherein the first strand comprises at least 15 contiguous nt differing by 0, 1, 2, or 3 nt from a first strand of: AD-39782.1 (SEQ ID NO: 703), or a modified or unmodified variant thereof.

[0600] A RNAi agent comprising a first and a second strand, wherein the first strand comprises at least 15 contiguous nt differing by 0, 1, 2, or 3 nt from a first strand of: AD-39788.1 (SEQ ID NO: 704), or a modified or unmodified variant thereof.

[0601] A RNAi agent comprising a first and a second strand, wherein the first strand comprises at least 15 contiguous nt differing by 0, 1, 2, or 3 nt from a first strand of: AD-39794.1 (SEQ ID NO: 705), or a modified or unmodified variant thereof.

[0602] A RNAi agent comprising a first and a second strand, wherein the first strand comprises at least 15 contiguous nt differing by 0, 1, 2, or 3 nt from a first strand of: AD-39800.1 (SEQ ID NO: 706), or a modified or unmodified variant thereof.

[0603] A RNAi agent comprising a first and a second strand, wherein the first strand comprises at least 15 contiguous nt differing by 0, 1, 2, or 3 nt from a first strand of: AD-39806.1 (SEQ ID NO: 707), or a modified or unmodified variant thereof.

[0604] A RNAi agent comprising a first and a second strand, wherein the first strand comprises at least 15 contiguous nt differing by 0, 1, 2, or 3 nt from a first strand of: AD-39812.1 (SEQ ID NO: 708), or a modified or unmodified variant thereof.

[0605] A RNAi agent comprising a first and a second strand, wherein the first strand comprises at least 15 contiguous nt differing by 0, 1, 2, or 3 nt from a first strand of: AD-39818.1 (SEQ ID NO: 709), or a modified or unmodified variant thereof.

[0606] A RNAi agent comprising a first and a second strand, wherein the first strand comprises at least 15 contiguous nt differing by 0, 1, 2, or 3 nt from a first strand of: AD-39824.1 (SEQ ID NO: 710), or a modified or unmodified variant thereof.

[0607] A RNAi agent comprising a first and a second strand, wherein the first strand comprises at least 15 contiguous nt differing by 0, 1, 2, or 3 nt from a first strand of: AD-39783.1 (SEQ ID NO: 711), or a modified or unmodified variant thereof.

[0608] A RNAi agent comprising a first and a second strand, wherein the first strand comprises at least 15 contiguous nt differing by 0, 1, 2, or 3 nt from a first strand of: AD-39789.1 (SEQ ID NO: 712), or a modified or unmodified variant thereof.

[0609] A RNAi agent comprising a first and a second strand, wherein the first strand comprises at least 15 contiguous nt differing by 0, 1, 2, or 3 nt from a first strand of: AD-39795.1 (SEQ ID NO: 713), or a modified or unmodified variant thereof.

[0610] A RNAi agent comprising a first and a second strand, wherein the first strand comprises at least 15 contiguous nt differing by 0, 1, 2, or 3 nt from a first strand of: AD-39801.1 (SEQ ID NO: 714), or a modified or unmodified variant thereof.

[0611] A RNAi agent comprising a first and a second strand, wherein the first strand comprises at least 15 contiguous nt differing by 0, 1, 2, or 3 nt from a first strand of: AD-39807.1 (SEQ ID NO: 715), or a modified or unmodified variant thereof.

[0612] A RNAi agent comprising a first and a second strand, wherein the first strand comprises at least 15 contiguous nt differing by 0, 1, 2, or 3 nt from a first strand of: AD-39813.1 (SEQ ID NO: 716), or a modified or unmodified variant thereof.

[0613] A RNAi agent comprising a first and a second strand, wherein the first strand comprises at least 15 contiguous nt differing by 0, 1, 2, or 3 nt from a first strand of: AD-39819.1 (SEQ ID NO: 717), or a modified or unmodified variant thereof.

[0614] A RNAi agent comprising a first and a second strand, wherein the first strand comprises at least 15 contiguous nt differing by 0, 1, 2, or 3 nt from a first strand of: AD-39825.1 (SEQ ID NO: 718), or a modified or unmodified variant thereof.

[0615] A RNAi agent comprising a first and a second strand, wherein the first strand comprises at least 15 contiguous nt differing by 0, 1, 2, or 3 nt from a first strand of: AD-39831.1 (SEQ ID NO: 719), or a modified or unmodified variant thereof.

[0616] A RNAi agent comprising a first and a second strand, wherein the first strand comprises at least 15 contiguous nt differing by 0, 1, 2, or 3 nt from a first strand of: AD-39837.1 (SEQ ID NO: 720), or a modified or unmodified variant thereof.

[0617] A RNAi agent comprising a first and a second strand, wherein the first strand comprises at least 15 contiguous nt differing by 0, 1, 2, or 3 nt from a first strand of: AD-39843.1 (SEQ ID NO: 721), or a modified or unmodified variant thereof.

[0618] A RNAi agent comprising a first and a second strand, wherein the first strand comprises at least 15 contiguous nt differing by 0, 1, 2, or 3 nt from a first strand of: AD-39849.1 (SEQ ID NO: 722), or a modified or unmodified variant thereof.

[0619] A RNAi agent comprising a first and a second strand, wherein the first strand comprises at least 15 contiguous nt differing by 0, 1, 2, or 3 nt from a first strand of: AD-39855.1 (SEQ ID NO: 723), or a modified or unmodified variant thereof.

[0620] A RNAi agent comprising a first and a second strand, wherein the first strand comprises at least 15 contiguous nt differing by 0, 1, 2, or 3 nt from a first strand of: AD-39861.1 (SEQ ID NO: 724), or a modified or unmodified variant thereof.

[0621] A RNAi agent comprising a first and a second strand, wherein the first strand comprises at least 15 contiguous nt differing by 0, 1, 2, or 3 nt from a first strand of: AD-39867.1 (SEQ ID NO: 725), or a modified or unmodified variant thereof.

[0622] A RNAi agent comprising a first and a second strand, wherein the first strand comprises at least 15 contiguous nt differing by 0, 1, 2, or 3 nt from a first strand of: AD-39826.1 (SEQ ID NO: 726), or a modified or unmodified variant thereof.

[0623] A RNAi agent comprising a first and a second strand, wherein the first strand comprises at least 15 contiguous nt differing by 0, 1, 2, or 3 nt from a first strand of: AD-39832.1 (SEQ ID NO: 727), or a modified or unmodified variant thereof.

[0624] A RNAi agent comprising a first and a second strand, wherein the first strand comprises at least 15 contiguous nt differing by 0, 1, 2, or 3 nt from a first strand of: AD-39838.1 (SEQ ID NO: 728), or a

[0625] A RNAi agent comprising a first and a second strand, wherein the first strand comprises at least 15 contiguous nt differing by 0, 1, 2, or 3 nt from a first strand of: AD-39844.1 (SEQ ID NO: 729), or a modified or unmodified variant thereof.

[0626] A RNAi agent comprising a first and a second strand, wherein the first strand comprises at least 15 contiguous nt differing by 0, 1, 2, or 3 nt from a first strand of: AD-39850.1 (SEQ ID NO: 730), or a modified or unmodified variant thereof.

[0627] A RNAi agent comprising a first and a second strand, wherein the first strand comprises at least 15 contiguous nt differing by 0, 1, 2, or 3 nt from a first strand of: AD-39856.1 (SEQ ID NO: 731), or a modified or unmodified variant thereof.

[0628] A RNAi agent comprising a first and a second strand, wherein the first strand comprises at least 15 contiguous nt differing by 0, 1, 2, or 3 nt from a first strand of: AD-39862.1 (SEQ ID NO: 732), or a modified or unmodified variant thereof.

[0629] A RNAi agent comprising a first and a second strand, wherein the first strand comprises at least 15 contiguous nt differing by 0, 1, 2, or 3 nt from a first strand of: AD-39868.1 (SEQ ID NO: 733), or a modified or unmodified variant thereof.

[0630] A RNAi agent comprising a first and a second strand, wherein the first strand comprises at least 15 contiguous nt differing by 0, 1, 2, or 3 nt from a first strand of: AD-39827.1 (SEQ ID NO: 734), or a modified or unmodified variant thereof.

[0631] A RNAi agent comprising a first and a second strand, wherein the first strand comprises at least 15 contiguous nt differing by 0, 1, 2, or 3 nt from a first strand of: AD-39833.1 (SEQ ID NO: 735), or a modified or unmodified variant thereof.

[0632] A RNAi agent comprising a first and a second strand, wherein the first strand comprises at least 15 contiguous nt differing by 0, 1, 2, or 3 nt from a first strand of: AD-39839.1 (SEQ ID NO: 736), or a modified or unmodified variant thereof.

[0633] A RNAi agent comprising a first and a second strand, wherein the first strand comprises at least 15 contiguous nt differing by 0, 1, 2, or 3 nt from a first strand of: AD-39845.1 (SEQ ID NO: 737), or a modified or unmodified variant thereof.

[0634] A RNAi agent comprising a first and a second strand, wherein the first strand comprises at least 15 contiguous nt differing by 0, 1, 2, or 3 nt from a first strand of: AD-39851.1 (SEQ ID NO: 738), or a modified or unmodified variant thereof.

[0635] A RNAi agent comprising a first and a second strand, wherein the first strand comprises at least 15 contiguous nt differing by 0, 1, 2, or 3 nt from a first strand of: AD-39857.1 (SEQ ID NO: 739), or a modified or unmodified variant thereof.

[0636] A RNAi agent comprising a first and a second strand, wherein the first strand comprises at least 15 contiguous nt differing by 0, 1, 2, or 3 nt from a first strand of: AD-39863.1 (SEQ ID NO: 740), or a modified or unmodified variant thereof.

[0637] A RNAi agent comprising a first and a second strand, wherein the first strand comprises at least 15 contiguous nt differing by 0, 1, 2, or 3 nt from a first strand of: AD-39869.1 (SEQ ID NO: 741), or a modified or unmodified variant thereof.

[0638] A RNAi agent comprising a first and a second strand, wherein the first strand comprises at least 15 contiguous nt differing by 0, 1, 2, or 3 nt from a first strand of: AD-39828.1 (SEQ ID NO: 742), or a modified or unmodified variant thereof.

[0639] A RNAi agent comprising a first and a second strand, wherein the first strand comprises at least 15 contiguous nt differing by 0, 1, 2, or 3 nt from a first strand of: AD-39834.1 (SEQ ID NO: 743), or a modified or unmodified variant thereof.

[0640] A RNAi agent comprising a first and a second strand, wherein the first strand comprises at least 15 contiguous nt differing by 0, 1, 2, or 3 nt from a first strand of: AD-39840.1 (SEQ ID NO: 744), or a modified or unmodified variant thereof.

[0641] A RNAi agent comprising a first and a second strand, wherein the first strand comprises at least 15 contiguous nt differing by 0, 1, 2, or 3 nt from a first strand of: AD-39846.1 (SEQ ID NO: 745), or a modified or unmodified variant thereof.

[0642] A RNAi agent comprising a first and a second strand, wherein the first strand comprises at least 15 contiguous nt differing by 0, 1, 2, or 3 nt from a first strand of: AD-39852.1 (SEQ ID NO: 746), or a modified or unmodified variant thereof.

[0643] A RNAi agent comprising a first and a second strand, wherein the first strand comprises at least 15 contiguous nt differing by 0, 1, 2, or 3 nt from a first strand of: AD-39858.1 (SEQ ID NO: 747), or a modified or unmodified variant thereof.

[0644] A RNAi agent comprising a first and a second strand, wherein the first strand comprises at least 15 contiguous nt differing by 0, 1, 2, or 3 nt from a first strand of: AD-39864.1 (SEQ ID NO: 748), or a modified or unmodified variant thereof.

[0645] A RNAi agent comprising a first and a second strand, wherein the first strand comprises at least 15 contiguous nt differing by 0, 1, 2, or 3 nt from a first strand of: AD-39870.1 (SEQ ID NO: 749), or a modified or unmodified variant thereof.

[0646] A RNAi agent comprising a first and a second strand, wherein the first strand comprises at least 15 contiguous nt differing by 0, 1, 2, or 3 nt from a first strand of: AD-39829.1 (SEQ ID NO: 750), or a modified or unmodified variant thereof.

[0647] A RNAi agent comprising a first and a second strand, wherein the first strand comprises at least 15 contiguous nt differing by 0, 1, 2, or 3 nt from a first strand of: AD-39835.1 (SEQ ID NO: 751), or a modified or unmodified variant thereof.

[0648] A RNAi agent comprising a first and a second strand, wherein the first strand comprises at least 15 contiguous nt differing by 0, 1, 2, or 3 nt from a first strand of: AD-39841.1 (SEQ ID NO: 752), or a modified or unmodified variant thereof.

[0649] A RNAi agent comprising a first and a second strand, wherein the first strand comprises at least 15 contiguous nt differing by 0, 1, 2, or 3 nt from a first strand of: AD-39853.1 (SEQ ID NO: 753), or a modified or unmodified variant thereof.

[0650] A RNAi agent comprising a first and a second strand, wherein the first strand comprises at least 15 contiguous nt differing by 0, 1, 2, or 3 nt from a first strand of: AD-39859.1 (SEQ ID NO: 754), or a modified or unmodified variant thereof.

[0651] A RNAi agent comprising a first and a second strand, wherein the first strand comprises at least 15 contiguous nt differing by 0, 1, 2, or 3 nt from a first strand of: AD-39865.1 (SEQ ID NO: 755), or a modified or unmodified variant thereof.

[0652] A RNAi agent comprising a first and a second strand, wherein the first strand comprises at least 15 contiguous nt differing by 0, 1, 2, or 3 nt from a first strand of: AD-39871.1 (SEQ ID NO: 756), or a modified or unmodified variant thereof.

[0653] A RNAi agent comprising a first and a second strand, wherein the first strand comprises at least 15 contiguous nt differing by 0, 1, 2, or 3 nt from a first strand of: AD-39830.1 (SEQ ID NO: 757), or a modified or unmodified variant thereof.

[0654] A RNAi agent comprising a first and a second strand, wherein the first strand comprises at least 15 contiguous nt differing by 0, 1, 2, or 3 nt from a first strand of: AD-39836.1 (SEQ ID NO: 758), or a modified or unmodified variant thereof.

[0655] A RNAi agent comprising a first and a second strand, wherein the first strand comprises at least 15 contiguous nt differing by 0, 1, 2, or 3 nt from a first strand of: AD-39842.1 (SEQ ID NO: 759), or a modified or unmodified variant thereof.

[0656] A RNAi agent comprising a first and a second strand, wherein the first strand comprises at least 15 contiguous nt differing by 0, 1, 2, or 3 nt from a first strand of: AD-39848.1 (SEQ ID NO: 760), or a modified or unmodified variant thereof.

[0657] A RNAi agent comprising a first and a second strand, wherein the first strand comprises at least 15 contiguous nt differing by 0, 1, 2, or 3 nt from a first strand of: AD-39854.1 (SEQ ID NO: 761), or a modified or unmodified variant thereof.

[0658] A RNAi agent comprising a first and a second strand, wherein the first strand comprises at least 15 contiguous nt differing by 0, 1, 2, or 3 nt from a first strand of: AD-39860.1 (SEQ ID NO: 762), or a modified or unmodified variant thereof.

[0659] A RNAi agent comprising a first and a second strand, wherein the first strand comprises at least 15 contiguous nt differing by 0, 1, 2, or 3 nt from a first strand of: AD-39866.1 (SEQ ID NO: 763), or a modified or unmodified variant thereof.

[0660] A RNAi agent comprising a first and a second strand, wherein the first strand comprises at least 15 contiguous nt differing by 0, 1, 2, or 3 nt from a first strand of: AD-39992.1 (SEQ ID NO: 764), or a modified or unmodified variant thereof.

[0661] A RNAi agent comprising a first and a second strand, wherein the first strand comprises at least 15 contiguous nt differing by 0, 1, 2, or 3 nt from a first strand of: AD-39998.1 (SEQ ID NO: 765), or a modified or unmodified variant thereof.

[0662] A RNAi agent comprising a first and a second strand, wherein the first strand comprises at least 15 contiguous nt differing by 0, 1, 2, or 3 nt from a first strand of: AD-40004.1 (SEQ ID NO: 766), or a modified or unmodified variant thereof.

[0663] A RNAi agent comprising a first and a second strand, wherein the first strand comprises at least 15 contiguous nt differing by 0, 1, 2, or 3 nt from a first strand of: AD-40010.1 (SEQ ID NO: 767), or a modified or unmodified variant thereof.

[0664] A RNAi agent comprising a first and a second strand, wherein the first strand comprises at least 15 contiguous nt differing by 0, 1, 2, or 3 nt from a first strand of: AD-40016.1 (SEQ ID NO: 768), or a

[0665] A RNAi agent comprising a first and a second strand, wherein the first strand comprises at least 15 contiguous nt differing by 0, 1, 2, or 3 nt from a first strand of: AD-40022.1 (SEQ ID NO: 769), or a modified or unmodified variant thereof.

[0666] A RNAi agent comprising a first and a second strand, wherein the first strand comprises at least 15 contiguous nt differing by 0, 1, 2, or 3 nt from a first strand of: AD-40028.1 (SEQ ID NO: 770), or a modified or unmodified variant thereof.

[0667] A RNAi agent comprising a first and a second strand, wherein the first strand comprises at least 15 contiguous nt differing by 0, 1, 2, or 3 nt from a first strand of: AD-40034.1 (SEQ ID NO: 771), or a modified or unmodified variant thereof.

[0668] A RNAi agent comprising a first and a second strand, wherein the first strand comprises at least 15 contiguous nt differing by 0, 1, 2, or 3 nt from a first strand of: AD-39999.1 (SEQ ID NO: 772), or a modified or unmodified variant thereof.

[0669] A RNAi agent comprising a first and a second strand, wherein the first strand comprises at least 15 contiguous nt differing by 0, 1, 2, or 3 nt from a first strand of: AD-40005.1 (SEQ ID NO: 773), or a modified or unmodified variant thereof.

[0670] A RNAi agent comprising a first and a second strand, wherein the first strand comprises at least 15 contiguous nt differing by 0, 1, 2, or 3 nt from a first strand of: AD-40011.1 (SEQ ID NO: 774), or a modified or unmodified variant thereof.

[0671] A RNAi agent comprising a first and a second strand, wherein the first strand comprises at least 15 contiguous nt differing by 0, 1, 2, or 3 nt from a first strand of: AD-40017.1 (SEQ ID NO: 775), or a modified or unmodified variant thereof.

[0672] A RNAi agent comprising a first and a second strand, wherein the first strand comprises at least 15 contiguous nt differing by 0, 1, 2, or 3 nt from a first strand of: AD-40029.1 (SEQ ID NO: 776), or a modified or unmodified variant thereof.

[0673] A RNAi agent comprising a first and a second strand, wherein the first strand comprises at least 15 contiguous nt differing by 0, 1, 2, or 3 nt from a first strand of: AD-40035.1 (SEQ ID NO: 777), or a modified or unmodified variant thereof.

[0674] A RNAi agent comprising a first and a second strand, wherein the first strand comprises at least 15 contiguous nt differing by 0, 1, 2, or 3 nt from a first strand of: AD-39994.1 (SEQ ID NO: 778), or a modified or unmodified variant thereof.

[0675] A RNAi agent comprising a first and a second strand, wherein the first strand comprises at least 15 contiguous nt differing by 0, 1, 2, or 3 nt from a first strand of: AD-40000.1 (SEQ ID NO: 779), or a modified or unmodified variant thereof.

[0676] A RNAi agent comprising a first and a second strand, wherein the first strand comprises at least 15 contiguous nt differing by 0, 1, 2, or 3 nt from a first strand of: AD-40006.1 (SEQ ID NO: 780), or a modified or unmodified variant thereof.

[0677] A RNAi agent comprising a first and a second strand, wherein the first strand comprises at least 15 contiguous nt differing by 0, 1, 2, or 3 nt from a first strand of: AD-40012.1 (SEQ ID NO: 781), or a modified or unmodified variant thereof.

[0678] A RNAi agent comprising a first and a second strand, wherein the first strand comprises at least 15 contiguous nt differing by 0, 1, 2, or 3 nt from a first strand of: AD-40018.1 (SEQ ID NO: 782), or a modified or unmodified variant thereof.

[0679] A RNAi agent comprising a first and a second strand, wherein the first strand comprises at least 15 contiguous nt differing by 0, 1, 2, or 3 nt from a first strand of: AD-40024.1 (SEQ ID NO: 783), or a modified or unmodified variant thereof.

[0680] A RNAi agent comprising a first and a second strand, wherein the first strand comprises at least 15 contiguous nt differing by 0, 1, 2, or 3 nt from a first strand of: AD-40030.1 (SEQ ID NO: 784), or a modified or unmodified variant thereof.

[0681] A RNAi agent comprising a first and a second strand, wherein the first strand comprises at least 15 contiguous nt differing by 0, 1, 2, or 3 nt from a first strand of: AD-40036.1 (SEQ ID NO: 785), or a modified or unmodified variant thereof.

[0682] A RNAi agent comprising a first and a second strand, wherein the first strand comprises at least 15 contiguous nt differing by 0, 1, 2, or 3 nt from a first strand of: AD-39995.1 (SEQ ID NO: 786), or a modified or unmodified variant thereof.

[0683] A RNAi agent comprising a first and a second strand, wherein the first strand comprises at least 15 contiguous nt differing by 0, 1, 2, or 3 nt from a first strand of: AD-40001.1 (SEQ ID NO: 787), or a modified or unmodified variant thereof.

[0684] A RNAi agent comprising a first and a second strand, wherein the first strand comprises at least 15 contiguous nt differing by 0, 1, 2, or 3 nt from a first strand of: AD-40007.1 (SEQ ID NO: 788), or a modified or unmodified variant thereof.

[0685] A RNAi agent comprising a first and a second strand, wherein the first strand comprises at least 15 contiguous nt differing by 0, 1, 2, or 3 nt from a first strand of: AD-40013.1 (SEQ ID NO: 789), or a modified or unmodified variant thereof.

[0686] A RNAi agent comprising a first and a second strand, wherein the first strand comprises at least 15 contiguous nt differing by 0, 1, 2, or 3 nt from a first strand of: AD-40019.1 (SEQ ID NO: 790), or a modified or unmodified variant thereof.

[0687] A RNAi agent comprising a first and a second strand, wherein the first strand comprises at least 15 contiguous nt differing by 0, 1, 2, or 3 nt from a first strand of: AD-40025.1 (SEQ ID NO: 791), or a modified or unmodified variant thereof.

[0688] A RNAi agent comprising a first and a second strand, wherein the first strand comprises at least 15 contiguous nt differing by 0, 1, 2, or 3 nt from a first strand of: AD-40031.1 (SEQ ID NO: 792), or a modified or unmodified variant thereof.

[0689] A RNAi agent comprising a first and a second strand, wherein the first strand comprises at least 15 contiguous nt differing by 0, 1, 2, or 3 nt from a first strand of: AD-40037.1 (SEQ ID NO: 793), or a modified or unmodified variant thereof.

[0690] A RNAi agent comprising a first and a second strand, wherein the first strand comprises at least 15 contiguous nt differing by 0, 1, 2, or 3 nt from a first strand of: AD-39996.1 (SEQ ID NO: 794), or a modified or unmodified variant thereof.

[0691] A RNAi agent comprising a first and a second strand, wherein the first strand comprises at least 15 contiguous nt differing by 0, 1, 2, or 3 nt from a first strand of: AD-40002.1 (SEQ ID NO: 795), or a modified or unmodified variant thereof.

[0692] A RNAi agent comprising a first and a second strand, wherein the first strand comprises at least 15 contiguous nt differing by 0, 1, 2, or 3 nt from a first strand of: AD-40008.1 (SEQ ID NO: 796), or a modified or unmodified variant thereof.

[0693] A RNAi agent comprising a first and a second strand, wherein the first strand comprises at least 15 contiguous nt differing by 0, 1, 2, or 3 nt from a first strand of: AD-40014.1 (SEQ ID NO: 797), or a modified or unmodified variant thereof.

[0694] A RNAi agent comprising a first and a second strand, wherein the first strand comprises at least 15 contiguous nt differing by 0, 1, 2, or 3 nt from a first strand of: AD-40020.1 (SEQ ID NO: 798), or a modified or unmodified variant thereof.

[0695] A RNAi agent comprising a first and a second strand, wherein the first strand comprises at least 15 contiguous nt differing by 0, 1, 2, or 3 nt from a first strand of: AD-40026.1 (SEQ ID NO: 799), or a modified or unmodified variant thereof.

[0696] A RNAi agent comprising a first and a second strand, wherein the first strand comprises at least 15 contiguous nt differing by 0, 1, 2, or 3 nt from a first strand of: AD-40032.1 (SEQ ID NO: 800), or a modified or unmodified variant thereof.

[0697] A RNAi agent comprising a first and a second strand, wherein the first strand comprises at least 15 contiguous nt differing by 0, 1, 2, or 3 nt from a first strand of: AD-40038.1 (SEQ ID NO: 801), or a modified or unmodified variant thereof.

[0698] A RNAi agent comprising a first and a second strand, wherein the first strand comprises at least 15 contiguous nt differing by 0, 1, 2, or 3 nt from a first strand of: AD-39997.1 (SEQ ID NO: 802), or a modified or unmodified variant thereof.

[0699] A RNAi agent comprising a first and a second strand, wherein the first strand comprises at least 15 contiguous nt differing by 0, 1, 2, or 3 nt from a first strand of: AD-40009.1 (SEQ ID NO: 803), or a modified or unmodified variant thereof.

[0700] A RNAi agent comprising a first and a second strand, wherein the first strand comprises at least 15 contiguous nt differing by 0, 1, 2, or 3 nt from a first strand of: AD-40015.1 (SEQ ID NO: 804), or a modified or unmodified variant thereof.

[0701] A RNAi agent comprising a first and a second strand, wherein the first strand comprises at least 15 contiguous nt differing by 0, 1, 2, or 3 nt from a first strand of: AD-40021.1 (SEQ ID NO: 805), or a modified or unmodified variant thereof.

[0702] A RNAi agent comprising a first and a second strand, wherein the first strand comprises at least 15 contiguous nt differing by 0, 1, 2, or 3 nt from a first strand of: AD-40027.1 (SEQ ID NO: 806), or a modified or unmodified variant thereof.

[0703] A RNAi agent comprising a first and a second strand, wherein the first strand comprises at least 15 contiguous nt differing by 0, 1, 2, or 3 nt from a first strand of: AD-40033.1 (SEQ ID NO: 807), or a modified or unmodified variant thereof.

[0704] A RNAi agent comprising a first and a second strand, wherein the first strand comprises at least 15 contiguous nt differing by 0, 1, 2, or 3 nt from a first strand of: AD-40039.1 (SEQ ID NO: 808), or a

[0705] A RNAi agent comprising a first and a second strand, wherein the first strand comprises at least 15 contiguous nt differing by 0, 1, 2, or 3 nt from a first strand of: AD-40045.1 (SEQ ID NO: 809), or a modified or unmodified variant thereof.

[0706] A RNAi agent comprising a first and a second strand, wherein the first strand comprises at least 15 contiguous nt differing by 0, 1, 2, or 3 nt from a first strand of: AD-40051.1 (SEQ ID NO: 810), or a modified or unmodified variant thereof.

[0707] A RNAi agent comprising a first and a second strand, wherein the first strand comprises at least 15 contiguous nt differing by 0, 1, 2, or 3 nt from a first strand of: AD-40057.1 (SEQ ID NO: 811), or a modified or unmodified variant thereof.

[0708] A RNAi agent comprising a first and a second strand, wherein the first strand comprises at least 15 contiguous nt differing by 0, 1, 2, or 3 nt from a first strand of: AD-40063.1 (SEQ ID NO: 812), or a modified or unmodified variant thereof.

[0709] A RNAi agent comprising a first and a second strand, wherein the first strand comprises at least 15 contiguous nt differing by 0, 1, 2, or 3 nt from a first strand of: AD-40069.1 (SEQ ID NO: 813), or a modified or unmodified variant thereof.

[0710] A RNAi agent comprising a first and a second strand, wherein the first strand comprises at least 15 contiguous nt differing by 0, 1, 2, or 3 nt from a first strand of: AD-40075.1 (SEQ ID NO: 814), or a modified or unmodified variant thereof.

[0711] A RNAi agent comprising a first and a second strand, wherein the first strand comprises at least 15 contiguous nt differing by 0, 1, 2, or 3 nt from a first strand of: AD-40081.1 (SEQ ID NO: 815), or a modified or unmodified variant thereof.

[0712] A RNAi agent comprising a first and a second strand, wherein the first strand comprises at least 15 contiguous nt differing by 0, 1, 2, or 3 nt from a first strand of: AD-40040.1 (SEQ ID NO: 816), or a modified or unmodified variant thereof.

[0713] A RNAi agent comprising a first and a second strand, wherein the first strand comprises at least 15 contiguous nt differing by 0, 1, 2, or 3 nt from a first strand of: AD-40046.1 (SEQ ID NO: 817), or a modified or unmodified variant thereof.

[0714] A RNAi agent comprising a first and a second strand, wherein the first strand comprises at least 15 contiguous nt differing by 0, 1, 2, or 3 nt from a first strand of: AD-40052.1 (SEQ ID NO: 818), or a modified or unmodified variant thereof.

[0715] A RNAi agent comprising a first and a second strand, wherein the first strand comprises at least 15 contiguous nt differing by 0, 1, 2, or 3 nt from a first strand of: AD-40058.1 (SEQ ID NO: 819), or a modified or unmodified variant thereof.

[0716] A RNAi agent comprising a first and a second strand, wherein the first strand comprises at least 15 contiguous nt differing by 0, 1, 2, or 3 nt from a first strand of: AD-40064.1 (SEQ ID NO: 820), or a modified or unmodified variant thereof.

[0717] A RNAi agent comprising a first and a second strand, wherein the first strand comprises at least 15 contiguous nt differing by 0, 1, 2, or 3 nt from a first strand of: AD-40070.1 (SEQ ID NO: 821), or a modified or unmodified variant thereof.

[0718] A RNAi agent comprising a first and a second strand, wherein the first strand comprises at least 15 contiguous nt differing by 0, 1, 2, or 3 nt from a first strand of: AD-40076.1 (SEQ ID NO: 822), or a modified or unmodified variant thereof.

[0719] A RNAi agent comprising a first and a second strand, wherein the first strand comprises at least 15 contiguous nt differing by 0, 1, 2, or 3 nt from a first strand of: AD-40082.1 (SEQ ID NO: 823), or a modified or unmodified variant thereof.

[0720] A RNAi agent comprising a first and a second strand, wherein the first strand comprises at least 15 contiguous nt differing by 0, 1, 2, or 3 nt from a first strand of: AD-40041.1 (SEQ ID NO: 824), or a modified or unmodified variant thereof.

[0721] A RNAi agent comprising a first and a second strand, wherein the first strand comprises at least 15 contiguous nt differing by 0, 1, 2, or 3 nt from a first strand of: AD-40047.1 (SEQ ID NO: 825), or a modified or unmodified variant thereof.

[0722] A RNAi agent comprising a first and a second strand, wherein the first strand comprises at least 15 contiguous nt differing by 0, 1, 2, or 3 nt from a first strand of: AD-40053.1 (SEQ ID NO: 826), or a modified or unmodified variant thereof.

[0723] A RNAi agent comprising a first and a second strand, wherein the first strand comprises at least 15 contiguous nt differing by 0, 1, 2, or 3 nt from a first strand of: AD-40059.1 (SEQ ID NO: 827), or a modified or unmodified variant thereof.

[0724] A RNAi agent comprising a first and a second strand, wherein the first strand comprises at least 15 contiguous nt differing by 0, 1, 2, or 3 nt from a first strand of: AD-40065.1 (SEQ ID NO: 828), or a modified or unmodified variant thereof.

[0725] A RNAi agent comprising a first and a second strand, wherein the first strand comprises at least 15 contiguous nt differing by 0, 1, 2, or 3 nt from a first strand of: AD-40071.1 (SEQ ID NO: 829), or a modified or unmodified variant thereof.

[0726] A RNAi agent comprising a first and a second strand, wherein the first strand comprises at least 15 contiguous nt differing by 0, 1, 2, or 3 nt from a first strand of: AD-40077.1 (SEQ ID NO: 830), or a modified or unmodified variant thereof.

[0727] A RNAi agent comprising a first and a second strand, wherein the first strand comprises at least 15 contiguous nt differing by 0, 1, 2, or 3 nt from a first strand of: AD-40083.1 (SEQ ID NO: 831), or a modified or unmodified variant thereof.

[0728] A RNAi agent comprising a first and a second strand, wherein the first strand comprises at least 15 contiguous nt differing by 0, 1, 2, or 3 nt from a first strand of: AD-40042.1 (SEQ ID NO: 832), or a modified or unmodified variant thereof.

[0729] A RNAi agent comprising a first and a second strand, wherein the first strand comprises at least 15 contiguous nt differing by 0, 1, 2, or 3 nt from a first strand of: AD-40048.1 (SEQ ID NO: 833), or a modified or unmodified variant thereof.

[0730] A RNAi agent comprising a first and a second strand, wherein the first strand comprises at least 15 contiguous nt differing by 0, 1, 2, or 3 nt from a first strand of: AD-40054.1 (SEQ ID NO: 834), or a modified or unmodified variant thereof.

[0731] A RNAi agent comprising a first and a second strand, wherein the first strand comprises at least 15 contiguous nt differing by 0, 1, 2, or 3 nt from a first strand of: AD-40060.1 (SEQ ID NO: 835), or a modified or unmodified variant thereof.

[0732] A RNAi agent comprising a first and a second strand, wherein the first strand comprises at least 15 contiguous nt differing by 0, 1, 2, or 3 nt from a first strand of: AD-40066.1 (SEQ ID NO: 836), or a modified or unmodified variant thereof.

[0733] A RNAi agent comprising a first and a second strand, wherein the first strand comprises at least 15 contiguous nt differing by 0, 1, 2, or 3 nt from a first strand of: AD-40072.1 (SEQ ID NO: 837), or a modified or unmodified variant thereof.

[0734] A RNAi agent comprising a first and a second strand, wherein the first strand comprises at least 15 contiguous nt differing by 0, 1, 2, or 3 nt from a first strand of: AD-40078.1 (SEQ ID NO: 838), or a modified or unmodified variant thereof.

[0735] A RNAi agent comprising a first and a second strand, wherein the first strand comprises at least 15 contiguous nt differing by 0, 1, 2, or 3 nt from a first strand of: AD-40084.1 (SEQ ID NO: 839), or a modified or unmodified variant thereof.

[0736] A RNAi agent comprising a first and a second strand, wherein the first strand comprises at least 15 contiguous nt differing by 0, 1, 2, or 3 nt from a first strand of: AD-40043.1 (SEQ ID NO: 840), or a modified or unmodified variant thereof.

[0737] A RNAi agent comprising a first and a second strand, wherein the first strand comprises at least 15 contiguous nt differing by 0, 1, 2, or 3 nt from a first strand of: AD-40049.1 (SEQ ID NO: 841), or a modified or unmodified variant thereof.

[0738] A RNAi agent comprising a first and a second strand, wherein the first strand comprises at least 15 contiguous nt differing by 0, 1, 2, or 3 nt from a first strand of: AD-40055.1 (SEQ ID NO: 842), or a modified or unmodified variant thereof.

[0739] A RNAi agent comprising a first and a second strand, wherein the first strand comprises at least 15 contiguous nt differing by 0, 1, 2, or 3 nt from a first strand of: AD-40061.1 (SEQ ID NO: 843), or a modified or unmodified variant thereof.

[0740] A RNAi agent comprising a first and a second strand, wherein the first strand comprises at least 15 contiguous nt differing by 0, 1, 2, or 3 nt from a first strand of: AD-40067.1 (SEQ ID NO: 844), or a modified or unmodified variant thereof.

[0741] A RNAi agent comprising a first and a second strand, wherein the first strand comprises at least 15 contiguous nt differing by 0, 1, 2, or 3 nt from a first strand of: AD-40073.1 (SEQ ID NO: 845), or a modified or unmodified variant thereof.

[0742] A RNAi agent comprising a first and a second strand, wherein the first strand comprises at least 15 contiguous nt differing by 0, 1, 2, or 3 nt from a first strand of: AD-40079.1 (SEQ ID NO: 846), or a modified or unmodified variant thereof.

[0743] A RNAi agent comprising a first and a second strand, wherein the first strand comprises at least 15 contiguous nt differing by 0, 1, 2, or 3 nt from a first strand of: AD-40085.1 (SEQ ID NO: 847), or a modified or unmodified variant thereof.

[0744] A RNAi agent comprising a first and a second strand, wherein the first strand comprises at least 15 contiguous nt differing by 0, 1, 2, or 3 nt from a first strand of: AD-40044.1 (SEQ ID NO: 848), or a

[0745] A RNAi agent comprising a first and a second strand, wherein the first strand comprises at least 15 contiguous nt differing by 0, 1, 2, or 3 nt from a first strand of: AD-40050.1 (SEQ ID NO: 849), or a modified or unmodified variant thereof.

[0746] A RNAi agent comprising a first and a second strand, wherein the first strand comprises at least 15 contiguous nt differing by 0, 1, 2, or 3 nt from a first strand of: AD-40056.1 (SEQ ID NO: 850), or a modified or unmodified variant thereof.

[0747] A RNAi agent comprising a first and a second strand, wherein the first strand comprises at least 15 contiguous nt differing by 0, 1, 2, or 3 nt from a first strand of: AD-40062.1 (SEQ ID NO: 851), or a modified or unmodified variant thereof.

[0748] A RNAi agent comprising a first and a second strand, wherein the first strand comprises at least 15 contiguous nt differing by 0, 1, 2, or 3 nt from a first strand of: AD-40068.1 (SEQ ID NO: 852), or a modified or unmodified variant thereof.

[0749] A RNAi agent comprising a first and a second strand, wherein the first strand comprises at least 15 contiguous nt differing by 0, 1, 2, or 3 nt from a first strand of: AD-40074.1 (SEQ ID NO: 853), or a modified or unmodified variant thereof.

[0750] A RNAi agent comprising a first and a second strand, wherein the first strand comprises at least 15 contiguous nt differing by 0, 1, 2, or 3 nt from a first strand of: AD-40080.1 (SEQ ID NO: 854), or a modified or unmodified variant thereof.

[0751] A RNAi agent comprising a first and a second strand, wherein the first strand comprises at least 15 contiguous nt differing by 0, 1, 2, or 3 nt from a first strand of: AD-39720.1 (SEQ ID NO: 1754), or a modified or unmodified variant thereof.

[0752] A RNAi agent comprising a first and a second strand, wherein the first strand comprises at least 15 contiguous nt differing by 0, 1, 2, or 3 nt from a first strand of: AD-39706.1 (SEQ ID NO: 1755), or a modified or unmodified variant thereof.

[0753] A RNAi agent comprising a first and a second strand, wherein the first strand comprises at least 15 contiguous nt differing by 0, 1, 2, or 3 nt from a first strand of: AD-39712.1 (SEQ ID NO: 1756), or a modified or unmodified variant thereof.

[0754] A RNAi agent comprising a first and a second strand, wherein the first strand comprises at least 15 contiguous nt differing by 0, 1, 2, or 3 nt from a first strand of: AD-39760.1 (SEQ ID NO: 1757), or a modified or unmodified variant thereof.

[0755] A RNAi agent comprising a first and a second strand, wherein the first strand comprises at least 15 contiguous nt differing by 0, 1, 2, or 3 nt from a first strand of: AD-39732.1 (SEQ ID NO: 1758), or a modified or unmodified variant thereof.

[0756] A RNAi agent comprising a first and a second strand, wherein the first strand comprises at least 15 contiguous nt differing by 0, 1, 2, or 3 nt from a first strand of: AD-35541.4 (SEQ ID NO: 1759), or a modified or unmodified variant thereof.

[0757] A RNAi agent comprising a first and a second strand, wherein the first strand comprises at least 15 contiguous nt differing by 0, 1, 2, or 3 nt from a first strand of: AD-39735.1 or hs_KRAS_321_A22S26 (SEQ ID NO: 1760), or a modified or unmodified variant thereof. A RNAi agent comprising a first and a second strand, wherein the first strand comprises at least 15 contiguous nt differing by 0, 1, 2, or 3 nt from a first strand of: AD-39741.1, or modified or unmodified variants thereof.

[0758] A RNAi agent comprising a first and a second strand, wherein the first strand comprises at least 15 contiguous nt differing by 0, 1, 2, or 3 nt from a first strand of: hs_KRAS_322_A22S26 (SEQ ID NO: 1761), or a modified or unmodified variant thereof.

[0759] A RNAi agent comprising a first and a second strand, wherein the first strand comprises at least 15 contiguous nt differing by 0, 1, 2, or 3 nt from a first strand of: AD-39778.1 (SEQ ID NO: 1762), or a modified or unmodified variant thereof.

[0760] A RNAi agent comprising a first and a second strand, wherein the first strand comprises at least 15 contiguous nt differing by 0, 1, 2, or 3 nt from a first strand of: AD-39790.1 (SEQ ID NO: 1763), or a modified or unmodified variant thereof.

[0761] A RNAi agent comprising a first and a second strand, wherein the first strand comprises at least 15 contiguous nt differing by 0, 1, 2, or 3 nt from a first strand of: AD-39822.1 (SEQ ID NO: 1764), or a modified or unmodified variant thereof.

[0762] A RNAi agent comprising a first and a second strand, wherein the first strand comprises at least 15 contiguous nt differing by 0, 1, 2, or 3 nt from a first strand of: AD-35609.4 (SEQ ID NO: 1765), or a modified or unmodified variant thereof.

[0763] A RNAi agent comprising a first and a second strand, wherein the first strand comprises at least 15 contiguous nt differing by 0, 1, 2, or 3 nt from a first strand of: AD-35581.4 (SEQ ID NO: 1766), or a modified or unmodified variant thereof.

[0764] A RNAi agent comprising a first and a second strand, wherein the first strand comprises at least 15 contiguous nt differing by 0, 1, 2, or 3 nt from a first strand of: AD-39845.1 (SEQ ID NO: 1767), or a modified or unmodified variant thereof.

[0765] A RNAi agent comprising a first and a second strand, wherein the first strand comprises at least 15 contiguous nt differing by 0, 1, 2, or 3 nt from a first strand of: AD-39858.1 (SEQ ID NO: 1768), or a modified or unmodified variant thereof.

[0766] A RNAi agent comprising a first and a second strand, wherein the first strand comprises at least 15 contiguous nt differing by 0, 1, 2, or 3 nt from a first strand of: AD-39870.1 (SEQ ID NO: 1769), or a modified or unmodified variant thereof.

[0767] A RNAi agent comprising a first and a second strand, wherein the first strand comprises at least 15 contiguous nt differing by 0, 1, 2, or 3 nt from a first strand of: AD-35576.4 (SEQ ID NO: 1770), or a modified or unmodified variant thereof.

[0768] A RNAi agent comprising a first and a second strand, wherein the first strand comprises at least 15 contiguous nt differing by 0, 1, 2, or 3 nt from a first strand of: AD-35588.4 (SEQ ID NO: 1771), or a modified or unmodified variant thereof.

[0769] A RNAi agent comprising a first and a second strand, wherein the first strand comprises at least 15 contiguous nt differing by 0, 1, 2, or 3 nt from a first strand of: AD-35600.1 (SEQ ID NO: 1772), or a modified or unmodified variant thereof.

[0770] A RNAi agent comprising a first and a second strand, wherein the first strand comprises at least 15 contiguous nt differing by 0, 1, 2, or 3 nt from a first strand of: AD-35606.1 (SEQ ID NO: 1773), or a modified or unmodified variant thereof.

[0771] A RNAi agent comprising a first and a second strand, wherein the first strand comprises at least 15 contiguous nt differing by 0, 1, 2, or 3 nt from a first strand of: AD-38151.1 (SEQ ID NO: 1774), or a modified or unmodified variant thereof.

[0772] A RNAi agent comprising a first and a second strand, wherein the first strand comprises at least 15 contiguous nt differing by 0, 1, 2, or 3 nt from a first strand of: AD-38163.1 (SEQ ID NO: 1775), or a modified or unmodified variant thereof.

[0773] A RNAi agent comprising a first and a second strand, wherein the first strand comprises at least 15 contiguous nt differing by 0, 1, 2, or 3 nt from a first strand of: AD-39999.1 (SEQ ID NO: 1776), or a modified or unmodified variant thereof.

[0774] A RNAi agent comprising a first and a second strand, wherein the first strand comprises at least 15 contiguous nt differing by 0, 1, 2, or 3 nt from a first strand of: AD-38159.1 or hs_KRAS_528_A22S26 (SEQ ID NO: 1777), or a modified or unmodified variant thereof.

[0775] A RNAi agent comprising a first and a second strand, wherein the first strand comprises at least 15 contiguous nt differing by 0, 1, 2, or 3 nt from a first strand of: AD-38130.1 or hs_KRAS_531_A22S26 (SEQ ID NO: 1778), or a modified or unmodified variant thereof.

[0776] A RNAi agent comprising a first and a second strand, wherein the first strand comprises at least 15 contiguous nt differing by 0, 1, 2, or 3 nt from a first strand of: AD-38136.1 (SEQ ID NO: 1779), or a modified or unmodified variant thereof.

[0777] A RNAi agent comprising a first and a second strand, wherein the first strand comprises at least 15 contiguous nt differing by 0, 1, 2, or 3 nt from a first strand of: AD-40036.1 (SEQ ID NO: 1780), or a modified or unmodified variant thereof.

[0778] A RNAi agent comprising a first and a second strand, wherein the first strand comprises at least 15 contiguous nt differing by 0, 1, 2, or 3 nt from a first strand of: AD-40008.1 (SEQ ID NO: 1781), or a modified or unmodified variant thereof.

[0779] A RNAi agent comprising a first and a second strand, wherein the first strand comprises at least 15 contiguous nt differing by 0, 1, 2, or 3 nt from a first strand of: AD-40021.1 (SEQ ID NO: 1782), or a modified or unmodified variant thereof.

[0780] A RNAi agent comprising a first and a second strand, wherein the first strand comprises at least 15 contiguous nt differing by 0, 1, 2, or 3 nt from a first strand of: AD-40077.1 (SEQ ID NO: 1783), or a modified or unmodified variant thereof.

[0781] A RNAi agent comprising a first and a second strand, wherein the first strand comprises at least 15 contiguous nt differing by 0, 1, 2, or 3 nt from a first strand of: AD-40072.1 (SEQ ID NO: 1784), or a modified or unmodified variant thereof.

[0782] A RNAi agent comprising a first and a second strand, wherein the first strand comprises at least 15 contiguous nt differing by 0, 1, 2, or 3 nt from a first strand of: AD-40061.1 (SEQ ID NO: 1785), or a modified or unmodified variant thereof.

[0783] A RNAi agent comprising a first and a second strand, wherein the first strand comprises at least 15 contiguous nt differing by 0, 1, 2, or 3 nt from a first strand of: AD-40068.1 (SEQ ID NO: 1786), or a modified or unmodified variant thereof.

[0784] A RNAi agent comprising a first and a second strand, wherein the first strand comprises at least 15 contiguous nt differing by 0, 1, 2, or 3 nt from a first strand of: AD-38131.1 (SEQ ID NO: 1787), or a modified or unmodified variant thereof.

[0785] A RNAi agent comprising a first and a second strand, wherein the first strand comprises at least 15 contiguous nt differing by 0, 1, 2, or 3 nt from a first strand of: AD-38167.1 (SEQ ID NO: 1788), or a modified or unmodified variant thereof.

[0786] A RNAi agent comprising a first and a second strand, wherein the first strand comprises at least 15 contiguous nt differing by 0, 1, 2, or 3 nt from a first strand of: hs_KRAS 1273_A22S26 (SEQ ID NO: 1789), or a modified or unmodified variant thereof.

[0787] A RNAi agent comprising a first and a second strand, wherein the first strand comprises at least 15 contiguous nt differing by 0, 1, 2, or 3 nt from a first strand of: hs_KRAS 2892_A37S26 (SEQ ID NO: 1790), or a modified or unmodified variant thereof.

[0788] A RNAi agent comprising a first and a second strand, wherein the first strand comprises at least 15 contiguous nt differing by 0, 1, 2, or 3 nt from a first strand of: hs_KRAS 4731_A22S26 (SEQ ID NO: 1791), or a modified or unmodified variant thereof.

### Specific Embodiments Comprising at Least 15 Contiguous Nucleotides of any RNAi Agent Disclosed Herein

[0789] In one embodiment, the present disclosure pertains to: a composition comprising any one or more of: a RNAi agent comprising a first strand and a second strand, wherein the first strand comprises at least 15 contiguous nucleotides (differing by 0 nucleotides) from a first strand of: any RNAi agent from any of Tables 1 to 6 or modified or unmodified variants thereof.

[0790] Thus, in various embodiments, the present disclosure pertains to a composition comprising any one or more of the following: A RNAi agent comprising a first strand and a second strand, wherein the first strand comprises at least 15 contiguous nucleotides from a first strand of: AD-35523.3 (SEQ ID NO: 428), or a modified or unmodified variant thereof.

[0791] A RNAi agent comprising a first strand and a second strand, wherein the first strand comprises at least 15 contiguous nucleotides from a first strand of: AD-35529.1 (SEQ ID NO: 429), or a modified or unmodified variant thereof.

[0792] A RNAi agent comprising a first strand and a second strand, wherein the first strand comprises at least 15 contiguous nucleotides from a first strand of: AD-35535.4 (SEQ ID NO: 430), or a modified or unmodified variant thereof.

[0793] A RNAi agent comprising a first strand and a second strand, wherein the first strand comprises at least 15 contiguous nucleotides from a first strand of: AD-35541.4 (SEQ ID NO: 431), or a modified or unmodified variant thereof.

[0794] A RNAi agent comprising a first strand and a second strand, wherein the first strand comprises at least 15 contiguous nucleotides from a first strand of: AD-35547.4 (SEQ ID NO: 432), or a modified or unmodified variant thereof.

[0795] A RNAi agent comprising a first strand and a second strand, wherein the first strand comprises at least 15 contiguous nucleotides from a first strand of: AD-35553.4 (SEQ ID NO: 433), or a modified or unmodified variant thereof.

[0796] A RNAi agent comprising a first strand and a second strand, wherein the first strand comprises at least 15 contiguous nucleotides from a first strand of: AD-35559.4 (SEQ ID NO: 434), or a modified or unmodified variant thereof.

[0797] A RNAi agent comprising a first strand and a second strand, wherein the first strand comprises at least 15 contiguous nucleotides from a first strand of: AD-35565.4 (SEQ ID NO: 435), or a modified or unmodified variant thereof.

[0798] A RNAi agent comprising a first strand and a second strand, wherein the first strand comprises at least 15 contiguous nucleotides from a first strand of: AD-35524.4 (SEQ ID NO: 436), or a modified or unmodified variant thereof.

[0799] A RNAi agent comprising a first strand and a second strand, wherein the first strand comprises at least 15 contiguous nucleotides from a first strand of: AD-35530.4 (SEQ ID NO: 437), or a modified or unmodified variant thereof.

[0800] A RNAi agent comprising a first strand and a second strand, wherein the first strand comprises at least 15 contiguous nucleotides from a first strand of: AD-35536.4 (SEQ ID NO: 438), or a modified or unmodified variant thereof.

[0801] A RNAi agent comprising a first strand and a second strand, wherein the first strand comprises at least 15 contiguous nucleotides from a first strand of: AD-35542.4 (SEQ ID NO: 439), or a modified or unmodified variant thereof.

[0802] A RNAi agent comprising a first strand and a second strand, wherein the first strand comprises at least 15 contiguous nucleotides from a first strand of: AD-35548.4 (SEQ ID NO: 440), or a modified or unmodified variant thereof.

[0803] A RNAi agent comprising a first strand and a second strand, wherein the first strand comprises at least 15 contiguous nucleotides from a first strand of: AD-35554.4 (SEQ ID NO: 441), or a modified or unmodified variant thereof.

[0804] A RNAi agent comprising a first strand and a second strand, wherein the first strand comprises at least 15 contiguous nucleotides from a first strand of: AD-35560.2 (SEQ ID NO: 442), or a modified or unmodified variant thereof.

[0805] A RNAi agent comprising a first strand and a second strand, wherein the first strand comprises at least 15 contiguous nucleotides from a first strand of: AD-35566.4 (SEQ ID NO: 443), or a modified or unmodified variant thereof.

[0806] A RNAi agent comprising a first strand and a second strand, wherein the first strand comprises at least 15 contiguous nucleotides from a first strand of: AD-35525.2 (SEQ ID NO: 444), or a modified or unmodified variant thereof.

[0807] A RNAi agent comprising a first strand and a second strand, wherein the first strand comprises at least 15 contiguous nucleotides from a first strand of: AD-35531.4 (SEQ ID NO: 445), or a modified or

[0808] A RNAi agent comprising a first strand and a second strand, wherein the first strand comprises at least 15 contiguous nucleotides from a first strand of: AD-35537.4 (SEQ ID NO: 446), or a modified or unmodified variant thereof.

[0809] A RNAi agent comprising a first strand and a second strand, wherein the first strand comprises at least 15 contiguous nucleotides from a first strand of: AD-35543.2 (SEQ ID NO: 447), or a modified or unmodified variant thereof.

[0810] A RNAi agent comprising a first strand and a second strand, wherein the first strand comprises at least 15 contiguous nucleotides from a first strand of: AD-35549.4 (SEQ ID NO: 448), or a modified or unmodified variant thereof.

[0811] A RNAi agent comprising a first strand and a second strand, wherein the first strand comprises at least 15 contiguous nucleotides from a first strand of: AD-35555.4 (SEQ ID NO: 449), or a modified or unmodified variant thereof.

[0812] A RNAi agent comprising a first strand and a second strand, wherein the first strand comprises at least 15 contiguous nucleotides from a first strand of: AD-35561.4 (SEQ ID NO: 450), or a modified or unmodified variant thereof.

[0813] A RNAi agent comprising a first strand and a second strand, wherein the first strand comprises at least 15 contiguous nucleotides from a first strand of: AD-35567.4 (SEQ ID NO: 451), or a modified or unmodified variant thereof.

[0814] A RNAi agent comprising a first strand and a second strand, wherein the first strand comprises at least 15 contiguous nucleotides from a first strand of: AD-35526.4 (SEQ ID NO: 452), or a modified or unmodified variant thereof.

[0815] A RNAi agent comprising a first strand and a second strand, wherein the first strand comprises at least 15 contiguous nucleotides from a first strand of: AD-35532.4 (SEQ ID NO: 453), or a modified or unmodified variant thereof.

[0816] A RNAi agent comprising a first strand and a second strand, wherein the first strand comprises at least 15 contiguous nucleotides from a first strand of: AD-35538.4 (SEQ ID NO: 454), or a modified or unmodified variant thereof.

[0817] A RNAi agent comprising a first strand and a second strand, wherein the first strand comprises at least 15 contiguous nucleotides from a first strand of: AD-35544.4 (SEQ ID NO: 455), or a modified or unmodified variant thereof.

[0818] A RNAi agent comprising a first strand and a second strand, wherein the first strand comprises at least 15 contiguous nucleotides from a first strand of: AD-35550.4 (SEQ ID NO: 456), or a modified or unmodified variant thereof.

[0819] A RNAi agent comprising a first strand and a second strand, wherein the first strand comprises at least 15 contiguous nucleotides from a first strand of: AD-35556.4 (SEQ ID NO: 457), or a modified or unmodified variant thereof.

[0820] A RNAi agent comprising a first strand and a second strand, wherein the first strand comprises at least 15 contiguous nucleotides from a first strand of: AD-35562.4 (SEQ ID NO: 458), or a modified or unmodified variant thereof.

[0821] A RNAi agent comprising a first strand and a second strand, wherein the first strand comprises at least 15 contiguous nucleotides from a first strand of: AD-35568.4 (SEQ ID NO: 459), or a modified or unmodified variant thereof.

[0822] A RNAi agent comprising a first strand and a second strand, wherein the first strand comprises at least 15 contiguous nucleotides from a first strand of: AD-35527.4 (SEQ ID NO: 460), or a modified or unmodified variant thereof.

[0823] A RNAi agent comprising a first strand and a second strand, wherein the first strand comprises at least 15 contiguous nucleotides from a first strand of: AD-35533.4 (SEQ ID NO: 461), or a modified or unmodified variant thereof.

[0824] A RNAi agent comprising a first strand and a second strand, wherein the first strand comprises at least 15 contiguous nucleotides from a first strand of: AD-35539.4 (SEQ ID NO: 462), or a modified or unmodified variant thereof.

[0825] A RNAi agent comprising a first strand and a second strand, wherein the first strand comprises at least 15 contiguous nucleotides from a first strand of: AD-35545.4 (SEQ ID NO: 463), or a modified or unmodified variant thereof.

[0826] A RNAi agent comprising a first strand and a second strand, wherein the first strand comprises at least 15 contiguous nucleotides from a first strand of: AD-35551.4 (SEQ ID NO: 464), or a modified or unmodified variant thereof.

[0827] A RNAi agent comprising a first strand and a second strand, wherein the first strand comprises at least 15 contiguous nucleotides from a first strand of: AD-35563.4 (SEQ ID NO: 465), or a modified or unmodified variant thereof.

[0828] A RNAi agent comprising a first strand and a second strand, wherein the first strand comprises at least 15 contiguous nucleotides from a first strand of: AD-35528.4 (SEQ ID NO: 466), or a modified or unmodified variant thereof.

[0829] A RNAi agent comprising a first strand and a second strand, wherein the first strand comprises at least 15 contiguous nucleotides from a first strand of: AD-35540.4 (SEQ ID NO: 467), or a modified or unmodified variant thereof.

[0830] A RNAi agent comprising a first strand and a second strand, wherein the first strand comprises at least 15 contiguous nucleotides from a first strand of: AD-35546.4 (SEQ ID NO: 468), or a modified or unmodified variant thereof.

[0831] A RNAi agent comprising a first strand and a second strand, wherein the first strand comprises at least 15 contiguous nucleotides from a first strand of: AD-35552.4 (SEQ ID NO: 469), or a modified or unmodified variant thereof.

[0832] A RNAi agent comprising a first strand and a second strand, wherein the first strand comprises at least 15 contiguous nucleotides from a first strand of: AD-35558.4 (SEQ ID NO: 470), or a modified or unmodified variant thereof.

[0833] A RNAi agent comprising a first strand and a second strand, wherein the first strand comprises at least 15 contiguous nucleotides from a first strand of: AD-35564.4 (SEQ ID NO: 471), or a modified or unmodified variant thereof.

[0834] A RNAi agent comprising a first strand and a second strand, wherein the first strand comprises at least 15 contiguous nucleotides from a first strand of: AD-35570.4 (SEQ ID NO: 472), or a modified or unmodified variant thereof.

[0835] A RNAi agent comprising a first strand and a second strand, wherein the first strand comprises at least 15 contiguous nucleotides from a first strand of: AD-35571.4 (SEQ ID NO: 473), or a modified or unmodified variant thereof.

[0836] A RNAi agent comprising a first strand and a second strand, wherein the first strand comprises at least 15 contiguous nucleotides from a first strand of: AD-35577.4 (SEQ ID NO: 474), or a modified or unmodified variant thereof.

[0837] A RNAi agent comprising a first strand and a second strand, wherein the first strand comprises at least 15 contiguous nucleotides from a first strand of: AD-35583.4 (SEQ ID NO: 475), or a modified or unmodified variant thereof.

[0838] A RNAi agent comprising a first strand and a second strand, wherein the first strand comprises at least 15 contiguous nucleotides from a first strand of: AD-35589.4 (SEQ ID NO: 476), or a modified or unmodified variant thereof.

[0839] A RNAi agent comprising a first strand and a second strand, wherein the first strand comprises at least 15 contiguous nucleotides from a first strand of: AD-35595.4 (SEQ ID NO: 477), or a modified or unmodified variant thereof.

[0840] A RNAi agent comprising a first strand and a second strand, wherein the first strand comprises at least 15 contiguous nucleotides from a first strand of: AD-35601.4 (SEQ ID NO: 478), or a modified or unmodified variant thereof.

[0841] A RNAi agent comprising a first strand and a second strand, wherein the first strand comprises at least 15 contiguous nucleotides from a first strand of: AD-35607.4 (SEQ ID NO: 479), or a modified or unmodified variant thereof.

[0842] A RNAi agent comprising a first strand and a second strand, wherein the first strand comprises at least 15 contiguous nucleotides from a first strand of: AD-35613.4 (SEQ ID NO: 480), or a modified or unmodified variant thereof.

[0843] A RNAi agent comprising a first strand and a second strand, wherein the first strand comprises at least 15 contiguous nucleotides from a first strand of: AD-35572.4 (SEQ ID NO: 481), or a modified or unmodified variant thereof.

[0844] A RNAi agent comprising a first strand and a second strand, wherein the first strand comprises at least 15 contiguous nucleotides from a first strand of: AD-35578.4 (SEQ ID NO: 482), or a modified or unmodified variant thereof.

[0845] A RNAi agent comprising a first strand and a second strand, wherein the first strand comprises at least 15 contiguous nucleotides from a first strand of: AD-35584.4 (SEQ ID NO: 483), or a modified or unmodified variant thereof.

[0846] A RNAi agent comprising a first strand and a second strand, wherein the first strand comprises at least 15 contiguous nucleotides from a first strand of: AD-35590.4 (SEQ ID NO: 484), or a modified or unmodified variant thereof.

[0847] A RNAi agent comprising a first strand and a second strand, wherein the first strand comprises at least 15 contiguous nucleotides from a first strand of: AD-35596.4 (SEQ ID NO: 485), or a modified or

[0848] A RNAi agent comprising a first strand and a second strand, wherein the first strand comprises at least 15 contiguous nucleotides from a first strand of: AD-35602.4 (SEQ ID NO: 486), or a modified or unmodified variant thereof.

[0849] A RNAi agent comprising a first strand and a second strand, wherein the first strand comprises at least 15 contiguous nucleotides from a first strand of: AD-35608.4 (SEQ ID NO: 487), or a modified or unmodified variant thereof.

[0850] A RNAi agent comprising a first strand and a second strand, wherein the first strand comprises at least 15 contiguous nucleotides from a first strand of: AD-35614.4 (SEQ ID NO: 488), or a modified or unmodified variant thereof.

[0851] A RNAi agent comprising a first strand and a second strand, wherein the first strand comprises at least 15 contiguous nucleotides from a first strand of: AD-35573.4 (SEQ ID NO: 489), or a modified or unmodified variant thereof.

[0852] A RNAi agent comprising a first strand and a second strand, wherein the first strand comprises at least 15 contiguous nucleotides from a first strand of: AD-35579.4 (SEQ ID NO: 490), or a modified or unmodified variant thereof.

[0853] A RNAi agent comprising a first strand and a second strand, wherein the first strand comprises at least 15 contiguous nucleotides from a first strand of: AD-35585.4 (SEQ ID NO: 491), or a modified or unmodified variant thereof.

[0854] A RNAi agent comprising a first strand and a second strand, wherein the first strand comprises at least 15 contiguous nucleotides from a first strand of: AD-35591.4 (SEQ ID NO: 492), or a modified or unmodified variant thereof.

[0855] A RNAi agent comprising a first strand and a second strand, wherein the first strand comprises at least 15 contiguous nucleotides from a first strand of: AD-35597.4 (SEQ ID NO: 493), or a modified or unmodified variant thereof.

[0856] A RNAi agent comprising a first strand and a second strand, wherein the first strand comprises at least 15 contiguous nucleotides from a first strand of: AD-35603.4 (SEQ ID NO: 494), or a modified or unmodified variant thereof.

[0857] A RNAi agent comprising a first strand and a second strand, wherein the first strand comprises at least 15 contiguous nucleotides from a first strand of: AD-35609.4 (SEQ ID NO: 495), or a modified or unmodified variant thereof.

[0858] A RNAi agent comprising a first strand and a second strand, wherein the first strand comprises at least 15 contiguous nucleotides from a first strand of: AD-35615.4 (SEQ ID NO: 496), or a modified or unmodified variant thereof.

[0859] A RNAi agent comprising a first strand and a second strand, wherein the first strand comprises at least 15 contiguous nucleotides from a first strand of: AD-35574.4 (SEQ ID NO: 497), or a modified or unmodified variant thereof.

[0860] A RNAi agent comprising a first strand and a second strand, wherein the first strand comprises at least 15 contiguous nucleotides from a first strand of: AD-35580.1 (SEQ ID NO: 498), or a modified or unmodified variant thereof.

[0861] A RNAi agent comprising a first strand and a second strand, wherein the first strand comprises at least 15 contiguous nucleotides from a first strand of: AD-35586.4 (SEQ ID NO: 499), or a modified or unmodified variant thereof.

[0862] A RNAi agent comprising a first strand and a second strand, wherein the first strand comprises at least 15 contiguous nucleotides from a first strand of: AD-35592.4 (SEQ ID NO: 500), or a modified or unmodified variant thereof.

[0863] A RNAi agent comprising a first strand and a second strand, wherein the first strand comprises at least 15 contiguous nucleotides from a first strand of: AD-35598.4 (SEQ ID NO: 501), or a modified or unmodified variant thereof.

[0864] A RNAi agent comprising a first strand and a second strand, wherein the first strand comprises at least 15 contiguous nucleotides from a first strand of: AD-35604.4 (SEQ ID NO: 502), or a modified or unmodified variant thereof.

[0865] A RNAi agent comprising a first strand and a second strand, wherein the first strand comprises at least 15 contiguous nucleotides from a first strand of: AD-35610.4 (SEQ ID NO: 503), or a modified or unmodified variant thereof.

[0866] A RNAi agent comprising a first strand and a second strand, wherein the first strand comprises at least 15 contiguous nucleotides from a first strand of: AD-35616.4 (SEQ ID NO: 504), or a modified or unmodified variant thereof.

[0867] A RNAi agent comprising a first strand and a second strand, wherein the first strand comprises at least 15 contiguous nucleotides from a first strand of: AD-35575.4 (SEQ ID NO: 505), or a modified or unmodified variant thereof.

[0868] A RNAi agent comprising a first strand and a second strand, wherein the first strand comprises at least 15 contiguous nucleotides from a first strand of: AD-35581.4 (SEQ ID NO: 506), or a modified or unmodified variant thereof.

[0869] A RNAi agent comprising a first strand and a second strand, wherein the first strand comprises at least 15 contiguous nucleotides from a first strand of: AD-35587.4 (SEQ ID NO: 507), or a modified or unmodified variant thereof.

[0870] A RNAi agent comprising a first strand and a second strand, wherein the first strand comprises at least 15 contiguous nucleotides from a first strand of: AD-35593.4 (SEQ ID NO: 508), or a modified or unmodified variant thereof.

[0871] A RNAi agent comprising a first strand and a second strand, wherein the first strand comprises at least 15 contiguous nucleotides from a first strand of: AD-35599.4 (SEQ ID NO: 509), or a modified or unmodified variant thereof.

[0872] A RNAi agent comprising a first strand and a second strand, wherein the first strand comprises at least 15 contiguous nucleotides from a first strand of: AD-35605.4 (SEQ ID NO: 510), or a modified or unmodified variant thereof.

[0873] A RNAi agent comprising a first strand and a second strand, wherein the first strand comprises at least 15 contiguous nucleotides from a first strand of: AD-35611.4 (SEQ ID NO: 511), or a modified or unmodified variant thereof.

[0874] A RNAi agent comprising a first strand and a second strand, wherein the first strand comprises at least 15 contiguous nucleotides from a first strand of: AD-35617.4 (SEQ ID NO: 512), or a modified or unmodified variant thereof.

[0875] A RNAi agent comprising a first strand and a second strand, wherein the first strand comprises at least 15 contiguous nucleotides from a first strand of: AD-35576.4 (SEQ ID NO: 513), or a modified or unmodified variant thereof.

[0876] A RNAi agent comprising a first strand and a second strand, wherein the first strand comprises at least 15 contiguous nucleotides from a first strand of: AD-35588.4 (SEQ ID NO: 514), or a modified or unmodified variant thereof.

[0877] A RNAi agent comprising a first strand and a second strand, wherein the first strand comprises at least 15 contiguous nucleotides from a first strand of: AD-35667.1 (SEQ ID NO: 515), or a modified or unmodified variant thereof.

[0878] A RNAi agent comprising a first strand and a second strand, wherein the first strand comprises at least 15 contiguous nucleotides from a first strand of: AD-35673.1 (SEQ ID NO: 516), or a modified or unmodified variant thereof.

[0879] A RNAi agent comprising a first strand and a second strand, wherein the first strand comprises at least 15 contiguous nucleotides from a first strand of: AD-35679.1 (SEQ ID NO: 517), or a modified or unmodified variant thereof.

[0880] A RNAi agent comprising a first strand and a second strand, wherein the first strand comprises at least 15 contiguous nucleotides from a first strand of: AD-35685.1 (SEQ ID NO: 518), or a modified or unmodified variant thereof.

[0881] A RNAi agent comprising a first strand and a second strand, wherein the first strand comprises at least 15 contiguous nucleotides from a first strand of: AD-35691.1 (SEQ ID NO: 519), or a modified or unmodified variant thereof.

[0882] A RNAi agent comprising a first strand and a second strand, wherein the first strand comprises at least 15 contiguous nucleotides from a first strand of: AD-35557.1 (SEQ ID NO: 520), or a modified or unmodified variant thereof.

[0883] A RNAi agent comprising a first strand and a second strand, wherein the first strand comprises at least 15 contiguous nucleotides from a first strand of: AD-35618.1 (SEQ ID NO: 521), or a modified or unmodified variant thereof.

[0884] A RNAi agent comprising a first strand and a second strand, wherein the first strand comprises at least 15 contiguous nucleotides from a first strand of: AD-35569.1 (SEQ ID NO: 522), or a modified or unmodified variant thereof.

[0885] A RNAi agent comprising a first strand and a second strand, wherein the first strand comprises at least 15 contiguous nucleotides from a first strand of: AD-35534.1 (SEQ ID NO: 523), or a modified or unmodified variant thereof.

[0886] A RNAi agent comprising a first strand and a second strand, wherein the first strand comprises at least 15 contiguous nucleotides from a first strand of: AD-35582.1 (SEQ ID NO: 524), or a modified or unmodified variant thereof.

[0887] A RNAi agent comprising a first strand and a second strand, wherein the first strand comprises at least 15 contiguous nucleotides from a first strand of: AD-35594.1 (SEQ ID NO: 525), or a modified or

[0888] A RNAi agent comprising a first strand and a second strand, wherein the first strand comprises at least 15 contiguous nucleotides from a first strand of: AD-35600.1 (SEQ ID NO: 526), or a modified or unmodified variant thereof.

[0889] A RNAi agent comprising a first strand and a second strand, wherein the first strand comprises at least 15 contiguous nucleotides from a first strand of: AD-35606.1 (SEQ ID NO: 527), or a modified or unmodified variant thereof.

[0890] A RNAi agent comprising a first strand and a second strand, wherein the first strand comprises at least 15 contiguous nucleotides from a first strand of: AD-35612.1 (SEQ ID NO: 528), or a modified or unmodified variant thereof.

[0891] A RNAi agent comprising a first strand and a second strand, wherein the first strand comprises at least 15 contiguous nucleotides from a first strand of: AD-38127.1 (SEQ ID NO: 529), or a modified or unmodified variant thereof.

[0892] A RNAi agent comprising a first strand and a second strand, wherein the first strand comprises at least 15 contiguous nucleotides from a first strand of: AD-38133.1 (SEQ ID NO: 530), or a modified or unmodified variant thereof.

[0893] A RNAi agent comprising a first strand and a second strand, wherein the first strand comprises at least 15 contiguous nucleotides from a first strand of: AD-38139.1 (SEQ ID NO: 531), or a modified or unmodified variant thereof.

[0894] A RNAi agent comprising a first strand and a second strand, wherein the first strand comprises at least 15 contiguous nucleotides from a first strand of: AD-38145.1 (SEQ ID NO: 532), or a modified or unmodified variant thereof.

[0895] A RNAi agent comprising a first strand and a second strand, wherein the first strand comprises at least 15 contiguous nucleotides from a first strand of: AD-38151.1 (SEQ ID NO: 533), or a modified or unmodified variant thereof.

[0896] A RNAi agent comprising a first strand and a second strand, wherein the first strand comprises at least 15 contiguous nucleotides from a first strand of: AD-38157.1 (SEQ ID NO: 534), or a modified or unmodified variant thereof.

[0897] A RNAi agent comprising a first strand and a second strand, wherein the first strand comprises at least 15 contiguous nucleotides from a first strand of: AD-38163.1 (SEQ ID NO: 535), or a modified or unmodified variant thereof.

[0898] A RNAi agent comprising a first strand and a second strand, wherein the first strand comprises at least 15 contiguous nucleotides from a first strand of: AD-38169.1 (SEQ ID NO: 536), or a modified or unmodified variant thereof.

[0899] A RNAi agent comprising a first strand and a second strand, wherein the first strand comprises at least 15 contiguous nucleotides from a first strand of: AD-38128.1 (SEQ ID NO: 537), or a modified or unmodified variant thereof.

[0900] A RNAi agent comprising a first strand and a second strand, wherein the first strand comprises at least 15 contiguous nucleotides from a first strand of: AD-38134.1 (SEQ ID NO: 538), or a modified or unmodified variant thereof.

[0901] A RNAi agent comprising a first strand and a second strand, wherein the first strand comprises at least 15 contiguous nucleotides from a first strand of: AD-38140.1 (SEQ ID NO: 539), or a modified or unmodified variant thereof.

[0902] A RNAi agent comprising a first strand and a second strand, wherein the first strand comprises at least 15 contiguous nucleotides from a first strand of: AD-38146.1 (SEQ ID NO: 540), or a modified or unmodified variant thereof.

[0903] A RNAi agent comprising a first strand and a second strand, wherein the first strand comprises at least 15 contiguous nucleotides from a first strand of: AD-38152.1 (SEQ ID NO: 541), or a modified or unmodified variant thereof.

[0904] A RNAi agent comprising a first strand and a second strand, wherein the first strand comprises at least 15 contiguous nucleotides from a first strand of: AD-38158.1 (SEQ ID NO: 542), or a modified or unmodified variant thereof.

[0905] A RNAi agent comprising a first strand and a second strand, wherein the first strand comprises at least 15 contiguous nucleotides from a first strand of: AD-38164.1 (SEQ ID NO: 543), or a modified or unmodified variant thereof.

[0906] A RNAi agent comprising a first strand and a second strand, wherein the first strand comprises at least 15 contiguous nucleotides from a first strand of: AD-38170.1 (SEQ ID NO: 544), or a modified or unmodified variant thereof.

[0907] A RNAi agent comprising a first strand and a second strand, wherein the first strand comprises at least 15 contiguous nucleotides from a first strand of: AD-38129.1 (SEQ ID NO: 545), or a modified or unmodified variant thereof.

[0908] A RNAi agent comprising a first strand and a second strand, wherein the first strand comprises at least 15 contiguous nucleotides from a first strand of: AD-38135.1 (SEQ ID NO: 546), or a modified or unmodified variant thereof.

[0909] A RNAi agent comprising a first strand and a second strand, wherein the first strand comprises at least 15 contiguous nucleotides from a first strand of: AD-38141.1 (SEQ ID NO: 547), or a modified or unmodified variant thereof.

[0910] A RNAi agent comprising a first strand and a second strand, wherein the first strand comprises at least 15 contiguous nucleotides from a first strand of: AD-38147.1 (SEQ ID NO: 548), or a modified or unmodified variant thereof.

[0911] A RNAi agent comprising a first strand and a second strand, wherein the first strand comprises at least 15 contiguous nucleotides from a first strand of: AD-38153.1 (SEQ ID NO: 549), or a modified or unmodified variant thereof.

[0912] A RNAi agent comprising a first strand and a second strand, wherein the first strand comprises at least 15 contiguous nucleotides from a first strand of: AD-38159.1 (SEQ ID NO: 550), or a modified or unmodified variant thereof.

[0913] A RNAi agent comprising a first strand and a second strand, wherein the first strand comprises at least 15 contiguous nucleotides from a first strand of: AD-38165.1 (SEQ ID NO: 551), or a modified or unmodified variant thereof.

[0914] A RNAi agent comprising a first strand and a second strand, wherein the first strand comprises at least 15 contiguous nucleotides from a first strand of: AD-38171.1 (SEQ ID NO: 552), or a modified or unmodified variant thereof.

[0915] A RNAi agent comprising a first strand and a second strand, wherein the first strand comprises at least 15 contiguous nucleotides from a first strand of: AD-38130.1 (SEQ ID NO: 553), or a modified or unmodified variant thereof.

[0916] A RNAi agent comprising a first strand and a second strand, wherein the first strand comprises at least 15 contiguous nucleotides from a first strand of: AD-38136.1 (SEQ ID NO: 554), or a modified or unmodified variant thereof.

[0917] A RNAi agent comprising a first strand and a second strand, wherein the first strand comprises at least 15 contiguous nucleotides from a first strand of: AD-38142.1 (SEQ ID NO: 555), or a modified or unmodified variant thereof.

[0918] A RNAi agent comprising a first strand and a second strand, wherein the first strand comprises at least 15 contiguous nucleotides from a first strand of: AD-38148.1 (SEQ ID NO: 556), or a modified or unmodified variant thereof.

[0919] A RNAi agent comprising a first strand and a second strand, wherein the first strand comprises at least 15 contiguous nucleotides from a first strand of: AD-38154.1 (SEQ ID NO: 557), or a modified or unmodified variant thereof.

[0920] A RNAi agent comprising a first strand and a second strand, wherein the first strand comprises at least 15 contiguous nucleotides from a first strand of: AD-38160.1 (SEQ ID NO: 558), or a modified or unmodified variant thereof.

[0921] A RNAi agent comprising a first strand and a second strand, wherein the first strand comprises at least 15 contiguous nucleotides from a first strand of: AD-38166.1 (SEQ ID NO: 559), or a modified or unmodified variant thereof.

[0922] A RNAi agent comprising a first strand and a second strand, wherein the first strand comprises at least 15 contiguous nucleotides from a first strand of: AD-38172.1 (SEQ ID NO: 560), or a modified or unmodified variant thereof.

[0923] A RNAi agent comprising a first strand and a second strand, wherein the first strand comprises at least 15 contiguous nucleotides from a first strand of: AD-38131.1 (SEQ ID NO: 561), or a modified or unmodified variant thereof.

[0924] A RNAi agent comprising a first strand and a second strand, wherein the first strand comprises at least 15 contiguous nucleotides from a first strand of: AD-38137.1 (SEQ ID NO: 562), or a modified or unmodified variant thereof.

[0925] A RNAi agent comprising a first strand and a second strand, wherein the first strand comprises at least 15 contiguous nucleotides from a first strand of: AD-38143.1 (SEQ ID NO: 563), or a modified or unmodified variant thereof.

[0926] A RNAi agent comprising a first strand and a second strand, wherein the first strand comprises at least 15 contiguous nucleotides from a first strand of: AD-38149.1 (SEQ ID NO: 564), or a modified or unmodified variant thereof.

[0927] A RNAi agent comprising a first strand and a second strand, wherein the first strand comprises at least 15 contiguous nucleotides from a first strand of: AD-38155.1 (SEQ ID NO: 565), or a modified or

[0928] A RNAi agent comprising a first strand and a second strand, wherein the first strand comprises at least 15 contiguous nucleotides from a first strand of: AD-38161.1 (SEQ ID NO: 566), or a modified or unmodified variant thereof.

[0929] A RNAi agent comprising a first strand and a second strand, wherein the first strand comprises at least 15 contiguous nucleotides from a first strand of: AD-38167.1 (SEQ ID NO: 567), or a modified or unmodified variant thereof.

[0930] A RNAi agent comprising a first strand and a second strand, wherein the first strand comprises at least 15 contiguous nucleotides from a first strand of: AD-38173.1 (SEQ ID NO: 568), or a modified or unmodified variant thereof.

[0931] A RNAi agent comprising a first strand and a second strand, wherein the first strand comprises at least 15 contiguous nucleotides from a first strand of: AD-38132.1 (SEQ ID NO: 569), or a modified or unmodified variant thereof.

[0932] A RNAi agent comprising a first strand and a second strand, wherein the first strand comprises at least 15 contiguous nucleotides from a first strand of: AD-38138.1 (SEQ ID NO: 570), or a modified or unmodified variant thereof.

[0933] A RNAi agent comprising a first strand and a second strand, wherein the first strand comprises at least 15 contiguous nucleotides from a first strand of: AD-38144.1 (SEQ ID NO: 571), or a modified or unmodified variant thereof.

[0934] A RNAi agent comprising a first strand and a second strand, wherein the first strand comprises at least 15 contiguous nucleotides from a first strand of: AD-38150.1 (SEQ ID NO: 572), or a modified or unmodified variant thereof.

[0935] A RNAi agent comprising a first strand and a second strand, wherein the first strand comprises at least 15 contiguous nucleotides from a first strand of: AD-38156.1 (SEQ ID NO: 573), or a modified or unmodified variant thereof.

[0936] A RNAi agent comprising a first strand and a second strand, wherein the first strand comprises at least 15 contiguous nucleotides from a first strand of: AD-38162.1 (SEQ ID NO: 574), or a modified or unmodified variant thereof.

[0937] A RNAi agent comprising a first strand and a second strand, wherein the first strand comprises at least 15 contiguous nucleotides from a first strand of: AD-38168.1 (SEQ ID NO: 575), or a modified or unmodified variant thereof.

[0938] A RNAi agent comprising a first strand and a second strand, wherein the first strand comprises at least 15 contiguous nucleotides from a first strand of: AD-38174.1 (SEQ ID NO: 576), or a modified or unmodified variant thereof.

[0939] A RNAi agent comprising a first strand and a second strand, wherein the first strand comprises at least 15 contiguous nucleotides from a first strand of: AD-39683.1 (SEQ ID NO: 577), or a modified or unmodified variant thereof.

[0940] A RNAi agent comprising a first strand and a second strand, wherein the first strand comprises at least 15 contiguous nucleotides from a first strand of: AD-39689.1 (SEQ ID NO: 578), or a modified or unmodified variant thereof.

[0941] A RNAi agent comprising a first strand and a second strand, wherein the first strand comprises at least 15 contiguous nucleotides from a first strand of: AD-39695.1 (SEQ ID NO: 579), or a modified or unmodified variant thereof.

[0942] A RNAi agent comprising a first strand and a second strand, wherein the first strand comprises at least 15 contiguous nucleotides from a first strand of: AD-39701.1 (SEQ ID NO: 580), or a modified or unmodified variant thereof.

[0943] A RNAi agent comprising a first strand and a second strand, wherein the first strand comprises at least 15 contiguous nucleotides from a first strand of: AD-39707.1 (SEQ ID NO: 581), or a modified or unmodified variant thereof.

[0944] A RNAi agent comprising a first strand and a second strand, wherein the first strand comprises at least 15 contiguous nucleotides from a first strand of: AD-39713.1 (SEQ ID NO: 582), or a modified or unmodified variant thereof.

[0945] A RNAi agent comprising a first strand and a second strand, wherein the first strand comprises at least 15 contiguous nucleotides from a first strand of: AD-39719.1 (SEQ ID NO: 583), or a modified or unmodified variant thereof.

[0946] A RNAi agent comprising a first strand and a second strand, wherein the first strand comprises at least 15 contiguous nucleotides from a first strand of: AD-39725.1 (SEQ ID NO: 584), or a modified or unmodified variant thereof.

[0947] A RNAi agent comprising a first strand and a second strand, wherein the first strand comprises at least 15 contiguous nucleotides from a first strand of: AD-39684.1 (SEQ ID NO: 585), or a modified or unmodified variant thereof.

[0948] A RNAi agent comprising a first strand and a second strand, wherein the first strand comprises at least 15 contiguous nucleotides from a first strand of: AD-39690.1 (SEQ ID NO: 586), or a modified or unmodified variant thereof.

[0949] A RNAi agent comprising a first strand and a second strand, wherein the first strand comprises at least 15 contiguous nucleotides from a first strand of: AD-39696.1 (SEQ ID NO: 587), or a modified or unmodified variant thereof.

[0950] A RNAi agent comprising a first strand and a second strand, wherein the first strand comprises at least 15 contiguous nucleotides from a first strand of: AD-39702.1 (SEQ ID NO: 588), or a modified or unmodified variant thereof.

[0951] A RNAi agent comprising a first strand and a second strand, wherein the first strand comprises at least 15 contiguous nucleotides from a first strand of: AD-39708.1 (SEQ ID NO: 589), or a modified or unmodified variant thereof.

[0952] A RNAi agent comprising a first strand and a second strand, wherein the first strand comprises at least 15 contiguous nucleotides from a first strand of: AD-39714.1 (SEQ ID NO: 590), or a modified or unmodified variant thereof.

[0953] A RNAi agent comprising a first strand and a second strand, wherein the first strand comprises at least 15 contiguous nucleotides from a first strand of: AD-39720.1 (SEQ ID NO: 591), or a modified or unmodified variant thereof.

[0954] A RNAi agent comprising a first strand and a second strand, wherein the first strand comprises at least 15 contiguous nucleotides from a first strand of: AD-39726.1 (SEQ ID NO: 592), or a modified or unmodified variant thereof.

[0955] A RNAi agent comprising a first strand and a second strand, wherein the first strand comprises at least 15 contiguous nucleotides from a first strand of: AD-39685.1 (SEQ ID NO: 593), or a modified or unmodified variant thereof.

[0956] A RNAi agent comprising a first strand and a second strand, wherein the first strand comprises at least 15 contiguous nucleotides from a first strand of: AD-39691.1 (SEQ ID NO: 594), or a modified or unmodified variant thereof.

[0957] A RNAi agent comprising a first strand and a second strand, wherein the first strand comprises at least 15 contiguous nucleotides from a first strand of: AD-39697.1 (SEQ ID NO: 595), or a modified or unmodified variant thereof.

[0958] A RNAi agent comprising a first strand and a second strand, wherein the first strand comprises at least 15 contiguous nucleotides from a first strand of: AD-39703.1 (SEQ ID NO: 596), or a modified or unmodified variant thereof.

[0959] A RNAi agent comprising a first strand and a second strand, wherein the first strand comprises at least 15 contiguous nucleotides from a first strand of: AD-39709.1 (SEQ ID NO: 597), or a modified or unmodified variant thereof.

[0960] A RNAi agent comprising a first strand and a second strand, wherein the first strand comprises at least 15 contiguous nucleotides from a first strand of: AD-39715.1 (SEQ ID NO: 598), or a modified or unmodified variant thereof.

[0961] A RNAi agent comprising a first strand and a second strand, wherein the first strand comprises at least 15 contiguous nucleotides from a first strand of: AD-39721.1 (SEQ ID NO: 599), or a modified or unmodified variant thereof.

[0962] A RNAi agent comprising a first strand and a second strand, wherein the first strand comprises at least 15 contiguous nucleotides from a first strand of: AD-39727.1 (SEQ ID NO: 600), or a modified or unmodified variant thereof.

[0963] A RNAi agent comprising a first strand and a second strand, wherein the first strand comprises at least 15 contiguous nucleotides from a first strand of: AD-39686.1 (SEQ ID NO: 601), or a modified or unmodified variant thereof.

[0964] A RNAi agent comprising a first strand and a second strand, wherein the first strand comprises at least 15 contiguous nucleotides from a first strand of: AD-39692.1 (SEQ ID NO: 602), or a modified or unmodified variant thereof.

[0965] A RNAi agent comprising a first strand and a second strand, wherein the first strand comprises at least 15 contiguous nucleotides from a first strand of: AD-39698.1 (SEQ ID NO: 603), or a modified or unmodified variant thereof.

[0966] A RNAi agent comprising a first strand and a second strand, wherein the first strand comprises at least 15 contiguous nucleotides from a first strand of: AD-39704.1 (SEQ ID NO: 604), or a modified or unmodified variant thereof.

[0967] A RNAi agent comprising a first strand and a second strand, wherein the first strand comprises at least 15 contiguous nucleotides from a first strand of: AD-39710.1 (SEQ ID NO: 605), or a modified or

[0968] A RNAi agent comprising a first strand and a second strand, wherein the first strand comprises at least 15 contiguous nucleotides from a first strand of: AD-39716.1 (SEQ ID NO: 606), or a modified or unmodified variant thereof.

[0969] A RNAi agent comprising a first strand and a second strand, wherein the first strand comprises at least 15 contiguous nucleotides from a first strand of: AD-39722.1 (SEQ ID NO: 607), or a modified or unmodified variant thereof.

[0970] A RNAi agent comprising a first strand and a second strand, wherein the first strand comprises at least 15 contiguous nucleotides from a first strand of: AD-39728.1 (SEQ ID NO: 608), or a modified or unmodified variant thereof.

[0971] A RNAi agent comprising a first strand and a second strand, wherein the first strand comprises at least 15 contiguous nucleotides from a first strand of: AD-39687.1 (SEQ ID NO: 609), or a modified or unmodified variant thereof.

[0972] A RNAi agent comprising a first strand and a second strand, wherein the first strand comprises at least 15 contiguous nucleotides from a first strand of: AD-39693.1 (SEQ ID NO: 610), or a modified or unmodified variant thereof.

[0973] A RNAi agent comprising a first strand and a second strand, wherein the first strand comprises at least 15 contiguous nucleotides from a first strand of: AD-39699.1 (SEQ ID NO: 611), or a modified or unmodified variant thereof.

[0974] A RNAi agent comprising a first strand and a second strand, wherein the first strand comprises at least 15 contiguous nucleotides from a first strand of: AD-39705.1 (SEQ ID NO: 612), or a modified or unmodified variant thereof.

[0975] A RNAi agent comprising a first strand and a second strand, wherein the first strand comprises at least 15 contiguous nucleotides from a first strand of: AD-39711.1 (SEQ ID NO: 613), or a modified or unmodified variant thereof.

[0976] A RNAi agent comprising a first strand and a second strand, wherein the first strand comprises at least 15 contiguous nucleotides from a first strand of: AD-39717.1 (SEQ ID NO: 614), or a modified or unmodified variant thereof.

[0977] A RNAi agent comprising a first strand and a second strand, wherein the first strand comprises at least 15 contiguous nucleotides from a first strand of: AD-39723.1 (SEQ ID NO: 615), or a modified or unmodified variant thereof.

[0978] A RNAi agent comprising a first strand and a second strand, wherein the first strand comprises at least 15 contiguous nucleotides from a first strand of: AD-39729.1 (SEQ ID NO: 616), or a modified or unmodified variant thereof.

[0979] A RNAi agent comprising a first strand and a second strand, wherein the first strand comprises at least 15 contiguous nucleotides from a first strand of: AD-39688.1 (SEQ ID NO: 617), or a modified or unmodified variant thereof.

[0980] A RNAi agent comprising a first strand and a second strand, wherein the first strand comprises at least 15 contiguous nucleotides from a first strand of: AD-39694.1 (SEQ ID NO: 618), or a modified or unmodified variant thereof.

[0981] A RNAi agent comprising a first strand and a second strand, wherein the first strand comprises at least 15 contiguous nucleotides from a first strand of: AD-39700.1 (SEQ ID NO: 619), or a modified or unmodified variant thereof.

[0982] A RNAi agent comprising a first strand and a second strand, wherein the first strand comprises at least 15 contiguous nucleotides from a first strand of: AD-39706.1 (SEQ ID NO: 620), or a modified or unmodified variant thereof.

[0983] A RNAi agent comprising a first strand and a second strand, wherein the first strand comprises at least 15 contiguous nucleotides from a first strand of: AD-39712.1 (SEQ ID NO: 621), or a modified or unmodified variant thereof.

[0984] A RNAi agent comprising a first strand and a second strand, wherein the first strand comprises at least 15 contiguous nucleotides from a first strand of: AD-39718.1 (SEQ ID NO: 622), or a modified or unmodified variant thereof.

[0985] A RNAi agent comprising a first strand and a second strand, wherein the first strand comprises at least 15 contiguous nucleotides from a first strand of: AD-39724.1 (SEQ ID NO: 623), or a modified or unmodified variant thereof.

[0986] A RNAi agent comprising a first strand and a second strand, wherein the first strand comprises at least 15 contiguous nucleotides from a first strand of: AD-39730.1 (SEQ ID NO: 624), or a modified or unmodified variant thereof.

[0987] A RNAi agent comprising a first strand and a second strand, wherein the first strand comprises at least 15 contiguous nucleotides from a first strand of: AD-39736.1 (SEQ ID NO: 625), or a modified or unmodified variant thereof.

[0988] A RNAi agent comprising a first strand and a second strand, wherein the first strand comprises at least 15 contiguous nucleotides from a first strand of: AD-39742.1 (SEQ ID NO: 626), or a modified or unmodified variant thereof.

[0989] A RNAi agent comprising a first strand and a second strand, wherein the first strand comprises at least 15 contiguous nucleotides from a first strand of: AD-39748.1 (SEQ ID NO: 627), or a modified or unmodified variant thereof.

[0990] A RNAi agent comprising a first strand and a second strand, wherein the first strand comprises at least 15 contiguous nucleotides from a first strand of: AD-39754.1 (SEQ ID NO: 628), or a modified or unmodified variant thereof.

[0991] A RNAi agent comprising a first strand and a second strand, wherein the first strand comprises at least 15 contiguous nucleotides from a first strand of: AD-39760.1 (SEQ ID NO: 629), or a modified or unmodified variant thereof.

[0992] A RNAi agent comprising a first strand and a second strand, wherein the first strand comprises at least 15 contiguous nucleotides from a first strand of: AD-39766.1 (SEQ ID NO: 630), or a modified or unmodified variant thereof.

[0993] A RNAi agent comprising a first strand and a second strand, wherein the first strand comprises at least 15 contiguous nucleotides from a first strand of: AD-39772.1 (SEQ ID NO: 631), or a modified or unmodified variant thereof.

[0994] A RNAi agent comprising a first strand and a second strand, wherein the first strand comprises at least 15 contiguous nucleotides from a first strand of: AD-39731.1 (SEQ ID NO: 632), or a modified or unmodified variant thereof.

[0995] A RNAi agent comprising a first strand and a second strand, wherein the first strand comprises at least 15 contiguous nucleotides from a first strand of: AD-39737.1 (SEQ ID NO: 633), or a modified or unmodified variant thereof.

[0996] A RNAi agent comprising a first strand and a second strand, wherein the first strand comprises at least 15 contiguous nucleotides from a first strand of: AD-39743.1 (SEQ ID NO: 634), or a modified or unmodified variant thereof.

[0997] A RNAi agent comprising a first strand and a second strand, wherein the first strand comprises at least 15 contiguous nucleotides from a first strand of: AD-39749.1 (SEQ ID NO: 635), or a modified or unmodified variant thereof.

[0998] A RNAi agent comprising a first strand and a second strand, wherein the first strand comprises at least 15 contiguous nucleotides from a first strand of: AD-39755.1 (SEQ ID NO: 636), or a modified or unmodified variant thereof.

[0999] A RNAi agent comprising a first strand and a second strand, wherein the first strand comprises at least 15 contiguous nucleotides from a first strand of: AD-39761.1 (SEQ ID NO: 637), or a modified or unmodified variant thereof.

[1000] A RNAi agent comprising a first strand and a second strand, wherein the first strand comprises at least 15 contiguous nucleotides from a first strand of: AD-39767.1 (SEQ ID NO: 638), or a modified or unmodified variant thereof.

[1001] A RNAi agent comprising a first strand and a second strand, wherein the first strand comprises at least 15 contiguous nucleotides from a first strand of: AD-39773.1 (SEQ ID NO: 639), or a modified or unmodified variant thereof.

[1002] A RNAi agent comprising a first strand and a second strand, wherein the first strand comprises at least 15 contiguous nucleotides from a first strand of: AD-39732.1 (SEQ ID NO: 640), or a modified or unmodified variant thereof.

[1003] A RNAi agent comprising a first strand and a second strand, wherein the first strand comprises at least 15 contiguous nucleotides from a first strand of: AD-39738.1 (SEQ ID NO: 641), or a modified or unmodified variant thereof.

[1004] A RNAi agent comprising a first strand and a second strand, wherein the first strand comprises at least 15 contiguous nucleotides from a first strand of: AD-39744.1 (SEQ ID NO: 642), or a modified or unmodified variant thereof.

[1005] A RNAi agent comprising a first strand and a second strand, wherein the first strand comprises at least 15 contiguous nucleotides from a first strand of: AD-39750.1 (SEQ ID NO: 643), or a modified or unmodified variant thereof.

[1006] A RNAi agent comprising a first strand and a second strand, wherein the first strand comprises at least 15 contiguous nucleotides from a first strand of: AD-39756.1 (SEQ ID NO: 644), or a modified or unmodified variant thereof.

[1007] A RNAi agent comprising a first strand and a second strand, wherein the first strand comprises at least 15 contiguous nucleotides from a first strand of: AD-39762.1 (SEQ ID NO: 645), or a modified or

[1008] A RNAi agent comprising a first strand and a second strand, wherein the first strand comprises at least 15 contiguous nucleotides from a first strand of: AD-39768.1 (SEQ ID NO: 646), or a modified or unmodified variant thereof.

[1009] A RNAi agent comprising a first strand and a second strand, wherein the first strand comprises at least 15 contiguous nucleotides from a first strand of: AD-39774.1 (SEQ ID NO: 647), or a modified or unmodified variant thereof.

[1010] A RNAi agent comprising a first strand and a second strand, wherein the first strand comprises at least 15 contiguous nucleotides from a first strand of: AD-39733.1 (SEQ ID NO: 648), or a modified or unmodified variant thereof.

[1011] A RNAi agent comprising a first strand and a second strand, wherein the first strand comprises at least 15 contiguous nucleotides from a first strand of: AD-39739.1 (SEQ ID NO: 649), or a modified or unmodified variant thereof.

[1012] A RNAi agent comprising a first strand and a second strand, wherein the first strand comprises at least 15 contiguous nucleotides from a first strand of: AD-39745.1 (SEQ ID NO: 650), or a modified or unmodified variant thereof.

[1013] A RNAi agent comprising a first strand and a second strand, wherein the first strand comprises at least 15 contiguous nucleotides from a first strand of: AD-39751.1 (SEQ ID NO: 651), or a modified or unmodified variant thereof.

[1014] A RNAi agent comprising a first strand and a second strand, wherein the first strand comprises at least 15 contiguous nucleotides from a first strand of: AD-39757.1 (SEQ ID NO: 652), or a modified or unmodified variant thereof.

[1015] A RNAi agent comprising a first strand and a second strand, wherein the first strand comprises at least 15 contiguous nucleotides from a first strand of: AD-39763.1 (SEQ ID NO: 653), or a modified or unmodified variant thereof.

[1016] A RNAi agent comprising a first strand and a second strand, wherein the first strand comprises at least 15 contiguous nucleotides from a first strand of: AD-39769.1 (SEQ ID NO: 654), or a modified or unmodified variant thereof.

[1017] A RNAi agent comprising a first strand and a second strand, wherein the first strand comprises at least 15 contiguous nucleotides from a first strand of: AD-39775.1 (SEQ ID NO: 655), or a modified or unmodified variant thereof.

[1018] A RNAi agent comprising a first strand and a second strand, wherein the first strand comprises at least 15 contiguous nucleotides from a first strand of: AD-39734.1 (SEQ ID NO: 656), or a modified or unmodified variant thereof.

[1019] A RNAi agent comprising a first strand and a second strand, wherein the first strand comprises at least 15 contiguous nucleotides from a first strand of: AD-39740.1 (SEQ ID NO: 657), or a modified or unmodified variant thereof.

[1020] A RNAi agent comprising a first strand and a second strand, wherein the first strand comprises at least 15 contiguous nucleotides from a first strand of: AD-39746.1 (SEQ ID NO: 658), or a modified or unmodified variant thereof.

[1021] A RNAi agent comprising a first strand and a second strand, wherein the first strand comprises at least 15 contiguous nucleotides from a first strand of: AD-39752.1 (SEQ ID NO: 659), or a modified or unmodified variant thereof.

[1022] A RNAi agent comprising a first strand and a second strand, wherein the first strand comprises at least 15 contiguous nucleotides from a first strand of: AD-39758.1 (SEQ ID NO: 660), or a modified or unmodified variant thereof.

[1023] A RNAi agent comprising a first strand and a second strand, wherein the first strand comprises at least 15 contiguous nucleotides from a first strand of: AD-39764.1 (SEQ ID NO: 661), or a modified or unmodified variant thereof.

[1024] A RNAi agent comprising a first strand and a second strand, wherein the first strand comprises at least 15 contiguous nucleotides from a first strand of: AD-39770.1 (SEQ ID NO: 662), or a modified or unmodified variant thereof.

[1025] A RNAi agent comprising a first strand and a second strand, wherein the first strand comprises at least 15 contiguous nucleotides from a first strand of: AD-39776.1 (SEQ ID NO: 663), or a modified or unmodified variant thereof.

[1026] A RNAi agent comprising a first strand and a second strand, wherein the first strand comprises at least 15 contiguous nucleotides from a first strand of: AD-39735.1 (SEQ ID NO: 664), or a modified or unmodified variant thereof.

[1027] A RNAi agent comprising a first strand and a second strand, wherein the first strand comprises at least 15 contiguous nucleotides from a first strand of: AD-39741.1 (SEQ ID NO: 665), or a modified or unmodified variant thereof.

[1028] A RNAi agent comprising a first strand and a second strand, wherein the first strand comprises at least 15 contiguous nucleotides from a first strand of: AD-39747.1 (SEQ ID NO: 666), or a modified or unmodified variant thereof.

[1029] A RNAi agent comprising a first strand and a second strand, wherein the first strand comprises at least 15 contiguous nucleotides from a first strand of: AD-39753.1 (SEQ ID NO: 667), or a modified or unmodified variant thereof.

[1030] A RNAi agent comprising a first strand and a second strand, wherein the first strand comprises at least 15 contiguous nucleotides from a first strand of: AD-39759.1 (SEQ ID NO: 668), or a modified or unmodified variant thereof.

[1031] A RNAi agent comprising a first strand and a second strand, wherein the first strand comprises at least 15 contiguous nucleotides from a first strand of: AD-39765.1 (SEQ ID NO: 669), or a modified or unmodified variant thereof.

[1032] A RNAi agent comprising a first strand and a second strand, wherein the first strand comprises at least 15 contiguous nucleotides from a first strand of: AD-39771.1 (SEQ ID NO: 670), or a modified or unmodified variant thereof.

[1033] A RNAi agent comprising a first strand and a second strand, wherein the first strand comprises at least 15 contiguous nucleotides from a first strand of: AD-39778.1 (SEQ ID NO: 671), or a modified or unmodified variant thereof.

[1034] A RNAi agent comprising a first strand and a second strand, wherein the first strand comprises at least 15 contiguous nucleotides from a first strand of: AD-39784.1 (SEQ ID NO: 672), or a modified or unmodified variant thereof.

[1035] A RNAi agent comprising a first strand and a second strand, wherein the first strand comprises at least 15 contiguous nucleotides from a first strand of: AD-39790.1 (SEQ ID NO: 673), or a modified or unmodified variant thereof.

[1036] A RNAi agent comprising a first strand and a second strand, wherein the first strand comprises at least 15 contiguous nucleotides from a first strand of: AD-39796.1 (SEQ ID NO: 674), or a modified or unmodified variant thereof.

[1037] A RNAi agent comprising a first strand and a second strand, wherein the first strand comprises at least 15 contiguous nucleotides from a first strand of: AD-39802.1 (SEQ ID NO: 675), or a modified or unmodified variant thereof.

[1038] A RNAi agent comprising a first strand and a second strand, wherein the first strand comprises at least 15 contiguous nucleotides from a first strand of: AD-39808.1 (SEQ ID NO: 676), or a modified or unmodified variant thereof.

[1039] A RNAi agent comprising a first strand and a second strand, wherein the first strand comprises at least 15 contiguous nucleotides from a first strand of: AD-39814.1 (SEQ ID NO: 677), or a modified or unmodified variant thereof.

[1040] A RNAi agent comprising a first strand and a second strand, wherein the first strand comprises at least 15 contiguous nucleotides from a first strand of: AD-39820.1 (SEQ ID NO: 678), or a modified or unmodified variant thereof.

[1041] A RNAi agent comprising a first strand and a second strand, wherein the first strand comprises at least 15 contiguous nucleotides from a first strand of: AD-39779.1 (SEQ ID NO: 679), or a modified or unmodified variant thereof.

[1042] A RNAi agent comprising a first strand and a second strand, wherein the first strand comprises at least 15 contiguous nucleotides from a first strand of: AD-39785.1 (SEQ ID NO: 680), or a modified or unmodified variant thereof.

[1043] A RNAi agent comprising a first strand and a second strand, wherein the first strand comprises at least 15 contiguous nucleotides from a first strand of: AD-39791.1 (SEQ ID NO: 681), or a modified or unmodified variant thereof.

[1044] A RNAi agent comprising a first strand and a second strand, wherein the first strand comprises at least 15 contiguous nucleotides from a first strand of: AD-39797.1 (SEQ ID NO: 682), or a modified or unmodified variant thereof.

[1045] A RNAi agent comprising a first strand and a second strand, wherein the first strand comprises at least 15 contiguous nucleotides from a first strand of: AD-39803.1 (SEQ ID NO: 683), or a modified or unmodified variant thereof.

[1046] A RNAi agent comprising a first strand and a second strand, wherein the first strand comprises at least 15 contiguous nucleotides from a first strand of: AD-39809.1 (SEQ ID NO: 684), or a modified or unmodified variant thereof.

[1047] A RNAi agent comprising a first strand and a second strand, wherein the first strand comprises at least 15 contiguous nucleotides from a first strand of: AD-39815.1 (SEQ ID NO: 685), or a modified or

[1048] A RNAi agent comprising a first strand and a second strand, wherein the first strand comprises at least 15 contiguous nucleotides from a first strand of: AD-39821.1 (SEQ ID NO: 686), or a modified or unmodified variant thereof.

[1049] A RNAi agent comprising a first strand and a second strand, wherein the first strand comprises at least 15 contiguous nucleotides from a first strand of: AD-39780.1 (SEQ ID NO: 687), or a modified or unmodified variant thereof.

[1050] A RNAi agent comprising a first strand and a second strand, wherein the first strand comprises at least 15 contiguous nucleotides from a first strand of: AD-39786.1 (SEQ ID NO: 688), or a modified or unmodified variant thereof.

[1051] A RNAi agent comprising a first strand and a second strand, wherein the first strand comprises at least 15 contiguous nucleotides from a first strand of: AD-39792.1 (SEQ ID NO: 689), or a modified or unmodified variant thereof.

[1052] A RNAi agent comprising a first strand and a second strand, wherein the first strand comprises at least 15 contiguous nucleotides from a first strand of: AD-39798.1 (SEQ ID NO: 690), or a modified or unmodified variant thereof.

[1053] A RNAi agent comprising a first strand and a second strand, wherein the first strand comprises at least 15 contiguous nucleotides from a first strand of: AD-39804.1 (SEQ ID NO: 691), or a modified or unmodified variant thereof.

[1054] A RNAi agent comprising a first strand and a second strand, wherein the first strand comprises at least 15 contiguous nucleotides from a first strand of: AD-39810.1 (SEQ ID NO: 692), or a modified or unmodified variant thereof.

[1055] A RNAi agent comprising a first strand and a second strand, wherein the first strand comprises at least 15 contiguous nucleotides from a first strand of: AD-39816.1 (SEQ ID NO: 693), or a modified or unmodified variant thereof.

[1056] A RNAi agent comprising a first strand and a second strand, wherein the first strand comprises at least 15 contiguous nucleotides from a first strand of: AD-39822.1 (SEQ ID NO: 694), or a modified or unmodified variant thereof.

[1057] A RNAi agent comprising a first strand and a second strand, wherein the first strand comprises at least 15 contiguous nucleotides from a first strand of: AD-39781.1 (SEQ ID NO: 695), or a modified or unmodified variant thereof.

[1058] A RNAi agent comprising a first strand and a second strand, wherein the first strand comprises at least 15 contiguous nucleotides from a first strand of: AD-39787.1 (SEQ ID NO: 696), or a modified or unmodified variant thereof.

[1059] A RNAi agent comprising a first strand and a second strand, wherein the first strand comprises at least 15 contiguous nucleotides from a first strand of: AD-39793.1 (SEQ ID NO: 697), or a modified or unmodified variant thereof.

[1060] A RNAi agent comprising a first strand and a second strand, wherein the first strand comprises at least 15 contiguous nucleotides from a first strand of: AD-39799.1 (SEQ ID NO: 698), or a modified or unmodified variant thereof.

[1061] A RNAi agent comprising a first strand and a second strand, wherein the first strand comprises at least 15 contiguous nucleotides from a first strand of: AD-39805.1 (SEQ ID NO: 699), or a modified or unmodified variant thereof.

[1062] A RNAi agent comprising a first strand and a second strand, wherein the first strand comprises at least 15 contiguous nucleotides from a first strand of: AD-39811.1 (SEQ ID NO: 700), or a modified or unmodified variant thereof.

[1063] A RNAi agent comprising a first strand and a second strand, wherein the first strand comprises at least 15 contiguous nucleotides from a first strand of: AD-39817.1 (SEQ ID NO: 701), or a modified or unmodified variant thereof.

[1064] A RNAi agent comprising a first strand and a second strand, wherein the first strand comprises at least 15 contiguous nucleotides from a first strand of: AD-39823.1 (SEQ ID NO: 702), or a modified or unmodified variant thereof.

[1065] A RNAi agent comprising a first strand and a second strand, wherein the first strand comprises at least 15 contiguous nucleotides from a first strand of: AD-39782.1 (SEQ ID NO: 703), or a modified or unmodified variant thereof.

[1066] A RNAi agent comprising a first strand and a second strand, wherein the first strand comprises at least 15 contiguous nucleotides from a first strand of: AD-39788.1 (SEQ ID NO: 704), or a modified or unmodified variant thereof.

[1067] A RNAi agent comprising a first strand and a second strand, wherein the first strand comprises at least 15 contiguous nucleotides from a first strand of: AD-39794.1 (SEQ ID NO: 705), or a modified or unmodified variant thereof.

[1068] A RNAi agent comprising a first strand and a second strand, wherein the first strand comprises at least 15 contiguous nucleotides from a first strand of: AD-39800.1 (SEQ ID NO: 706), or a modified or unmodified variant thereof.

[1069] A RNAi agent comprising a first strand and a second strand, wherein the first strand comprises at least 15 contiguous nucleotides from a first strand of: AD-39806.1 (SEQ ID NO: 707), or a modified or unmodified variant thereof.

[1070] A RNAi agent comprising a first strand and a second strand, wherein the first strand comprises at least 15 contiguous nucleotides from a first strand of: AD-39812.1 (SEQ ID NO: 708), or a modified or unmodified variant thereof.

[1071] A RNAi agent comprising a first strand and a second strand, wherein the first strand comprises at least 15 contiguous nucleotides from a first strand of: AD-39818.1 (SEQ ID NO: 709), or a modified or unmodified variant thereof.

[1072] A RNAi agent comprising a first strand and a second strand, wherein the first strand comprises at least 15 contiguous nucleotides from a first strand of: AD-39824.1 (SEQ ID NO: 710), or a modified or unmodified variant thereof.

[1073] A RNAi agent comprising a first strand and a second strand, wherein the first strand comprises at least 15 contiguous nucleotides from a first strand of: AD-39783.1 (SEQ ID NO: 711), or a modified or unmodified variant thereof.

[1074] A RNAi agent comprising a first strand and a second strand, wherein the first strand comprises at least 15 contiguous nucleotides from a first strand of: AD-39789.1 (SEQ ID NO: 712), or a modified or unmodified variant thereof.

[1075] A RNAi agent comprising a first strand and a second strand, wherein the first strand comprises at least 15 contiguous nucleotides from a first strand of: AD-39795.1 (SEQ ID NO: 713), or a modified or unmodified variant thereof.

[1076] A RNAi agent comprising a first strand and a second strand, wherein the first strand comprises at least 15 contiguous nucleotides from a first strand of: AD-39801.1 (SEQ ID NO: 714), or a modified or unmodified variant thereof.

[1077] A RNAi agent comprising a first strand and a second strand, wherein the first strand comprises at least 15 contiguous nucleotides from a first strand of: AD-39807.1 (SEQ ID NO: 715), or a modified or unmodified variant thereof.

[1078] A RNAi agent comprising a first strand and a second strand, wherein the first strand comprises at least 15 contiguous nucleotides from a first strand of: AD-39813.1 (SEQ ID NO: 716), or a modified or unmodified variant thereof.

[1079] A RNAi agent comprising a first strand and a second strand, wherein the first strand comprises at least 15 contiguous nucleotides from a first strand of: AD-39819.1 (SEQ ID NO: 717), or a modified or unmodified variant thereof.

[1080] A RNAi agent comprising a first strand and a second strand, wherein the first strand comprises at least 15 contiguous nucleotides from a first strand of: AD-39825.1 (SEQ ID NO: 718), or a modified or unmodified variant thereof.

[1081] A RNAi agent comprising a first strand and a second strand, wherein the first strand comprises at least 15 contiguous nucleotides from a first strand of: AD-39831.1 (SEQ ID NO: 719), or a modified or unmodified variant thereof.

[1082] A RNAi agent comprising a first strand and a second strand, wherein the first strand comprises at least 15 contiguous nucleotides from a first strand of: AD-39837.1 (SEQ ID NO: 720), or a modified or unmodified variant thereof.

[1083] A RNAi agent comprising a first strand and a second strand, wherein the first strand comprises at least 15 contiguous nucleotides from a first strand of: AD-39843.1 (SEQ ID NO: 721), or a modified or unmodified variant thereof.

[1084] A RNAi agent comprising a first strand and a second strand, wherein the first strand comprises at least 15 contiguous nucleotides from a first strand of: AD-39849.1 (SEQ ID NO: 722), or a modified or unmodified variant thereof.

[1085] A RNAi agent comprising a first strand and a second strand, wherein the first strand comprises at least 15 contiguous nucleotides from a first strand of: AD-39855.1 (SEQ ID NO: 723), or a modified or unmodified variant thereof.

[1086] A RNAi agent comprising a first strand and a second strand, wherein the first strand comprises at least 15 contiguous nucleotides from a first strand of: AD-39861.1 (SEQ ID NO: 724), or a modified or unmodified variant thereof.

[1087] A RNAi agent comprising a first strand and a second strand, wherein the first strand comprises at least 15 contiguous nucleotides from a first strand of: AD-39867.1 (SEQ ID NO: 725), or a modified or

[1088] A RNAi agent comprising a first strand and a second strand, wherein the first strand comprises at least 15 contiguous nucleotides from a first strand of: AD-39826.1 (SEQ ID NO: 726), or a modified or unmodified variant thereof.

[1089] A RNAi agent comprising a first strand and a second strand, wherein the first strand comprises at least 15 contiguous nucleotides from a first strand of: AD-39832.1 (SEQ ID NO: 727), or a modified or unmodified variant thereof.

[1090] A RNAi agent comprising a first strand and a second strand, wherein the first strand comprises at least 15 contiguous nucleotides from a first strand of: AD-39838.1 (SEQ ID NO: 728), or a modified or unmodified variant thereof.

[1091] A RNAi agent comprising a first strand and a second strand, wherein the first strand comprises at least 15 contiguous nucleotides from a first strand of: AD-39844.1 (SEQ ID NO: 729), or a modified or unmodified variant thereof.

[1092] A RNAi agent comprising a first strand and a second strand, wherein the first strand comprises at least 15 contiguous nucleotides from a first strand of: AD-39850.1 (SEQ ID NO: 730), or a modified or unmodified variant thereof.

[1093] A RNAi agent comprising a first strand and a second strand, wherein the first strand comprises at least 15 contiguous nucleotides from a first strand of: AD-39856.1 (SEQ ID NO: 731), or a modified or unmodified variant thereof.

[1094] A RNAi agent comprising a first strand and a second strand, wherein the first strand comprises at least 15 contiguous nucleotides from a first strand of: AD-39862.1 (SEQ ID NO: 732), or a modified or unmodified variant thereof.

[1095] A RNAi agent comprising a first strand and a second strand, wherein the first strand comprises at least 15 contiguous nucleotides from a first strand of: AD-39868.1 (SEQ ID NO: 733), or a modified or unmodified variant thereof.

[1096] A RNAi agent comprising a first strand and a second strand, wherein the first strand comprises at least 15 contiguous nucleotides from a first strand of: AD-39827.1 (SEQ ID NO: 734), or a modified or unmodified variant thereof.

[1097] A RNAi agent comprising a first strand and a second strand, wherein the first strand comprises at least 15 contiguous nucleotides from a first strand of: AD-39833.1 (SEQ ID NO: 735), or a modified or unmodified variant thereof.

[1098] A RNAi agent comprising a first strand and a second strand, wherein the first strand comprises at least 15 contiguous nucleotides from a first strand of: AD-39839.1 (SEQ ID NO: 736), or a modified or unmodified variant thereof.

[1099] A RNAi agent comprising a first strand and a second strand, wherein the first strand comprises at least 15 contiguous nucleotides from a first strand of: AD-39845.1 (SEQ ID NO: 737), or a modified or unmodified variant thereof.

[1100] A RNAi agent comprising a first strand and a second strand, wherein the first strand comprises at least 15 contiguous nucleotides from a first strand of: AD-39851.1 (SEQ ID NO: 738), or a modified or unmodified variant thereof.

[1101] A RNAi agent comprising a first strand and a second strand, wherein the first strand comprises at least 15 contiguous nucleotides from a first strand of: AD-39857.1 (SEQ ID NO: 739), or a modified or unmodified variant thereof.

[1102] A RNAi agent comprising a first strand and a second strand, wherein the first strand comprises at least 15 contiguous nucleotides from a first strand of: AD-39863.1 (SEQ ID NO: 740), or a modified or unmodified variant thereof.

[1103] A RNAi agent comprising a first strand and a second strand, wherein the first strand comprises at least 15 contiguous nucleotides from a first strand of: AD-39869.1 (SEQ ID NO: 741), or a modified or unmodified variant thereof.

[1104] A RNAi agent comprising a first strand and a second strand, wherein the first strand comprises at least 15 contiguous nucleotides from a first strand of: AD-39828.1 (SEQ ID NO: 742), or a modified or unmodified variant thereof.

[1105] A RNAi agent comprising a first strand and a second strand, wherein the first strand comprises at least 15 contiguous nucleotides from a first strand of: AD-39834.1 (SEQ ID NO: 743), or a modified or unmodified variant thereof.

[1106] A RNAi agent comprising a first strand and a second strand, wherein the first strand comprises at least 15 contiguous nucleotides from a first strand of: AD-39840.1 (SEQ ID NO: 744), or a modified or unmodified variant thereof.

[1107] A RNAi agent comprising a first strand and a second strand, wherein the first strand comprises at least 15 contiguous nucleotides from a first strand of: AD-39846.1 (SEQ ID NO: 745), or a modified or unmodified variant thereof.

[1108] A RNAi agent comprising a first strand and a second strand, wherein the first strand comprises at least 15 contiguous nucleotides from a first strand of: AD-39852.1 (SEQ ID NO: 746), or a modified or unmodified variant thereof.

[1109] A RNAi agent comprising a first strand and a second strand, wherein the first strand comprises at least 15 contiguous nucleotides from a first strand of: AD-39858.1 (SEQ ID NO: 747), or a modified or unmodified variant thereof.

[1110] A RNAi agent comprising a first strand and a second strand, wherein the first strand comprises at least 15 contiguous nucleotides from a first strand of: AD-39864.1 (SEQ ID NO: 748), or a modified or unmodified variant thereof.

[1111] A RNAi agent comprising a first strand and a second strand, wherein the first strand comprises at least 15 contiguous nucleotides from a first strand of: AD-39870.1 (SEQ ID NO: 749), or a modified or unmodified variant thereof.

[1112] A RNAi agent comprising a first strand and a second strand, wherein the first strand comprises at least 15 contiguous nucleotides from a first strand of: AD-39829.1 (SEQ ID NO: 750), or a modified or unmodified variant thereof.

[1113] A RNAi agent comprising a first strand and a second strand, wherein the first strand comprises at least 15 contiguous nucleotides from a first strand of: AD-39835.1 (SEQ ID NO: 751), or a modified or unmodified variant thereof.

[1114] A RNAi agent comprising a first strand and a second strand, wherein the first strand comprises at least 15 contiguous nucleotides from a first strand of: AD-39841.1 (SEQ ID NO: 752), or a modified or unmodified variant thereof.

[1115] A RNAi agent comprising a first strand and a second strand, wherein the first strand comprises at least 15 contiguous nucleotides from a first strand of: AD-39853.1 (SEQ ID NO: 753), or a modified or unmodified variant thereof.

[1116] A RNAi agent comprising a first strand and a second strand, wherein the first strand comprises at least 15 contiguous nucleotides from a first strand of: AD-39859.1 (SEQ ID NO: 754), or a modified or unmodified variant thereof.

[1117] A RNAi agent comprising a first strand and a second strand, wherein the first strand comprises at least 15 contiguous nucleotides from a first strand of: AD-39865.1 (SEQ ID NO: 755), or a modified or unmodified variant thereof.

[1118] A RNAi agent comprising a first strand and a second strand, wherein the first strand comprises at least 15 contiguous nucleotides from a first strand of: AD-39871.1 (SEQ ID NO: 756), or a modified or unmodified variant thereof.

[1119] A RNAi agent comprising a first strand and a second strand, wherein the first strand comprises at least 15 contiguous nucleotides from a first strand of: AD-39830.1 (SEQ ID NO: 757), or a modified or unmodified variant thereof.

[1120] A RNAi agent comprising a first strand and a second strand, wherein the first strand comprises at least 15 contiguous nucleotides from a first strand of: AD-39836.1 (SEQ ID NO: 758), or a modified or unmodified variant thereof.

[1121] A RNAi agent comprising a first strand and a second strand, wherein the first strand comprises at least 15 contiguous nucleotides from a first strand of: AD-39842.1 (SEQ ID NO: 759), or a modified or unmodified variant thereof.

[1122] A RNAi agent comprising a first strand and a second strand, wherein the first strand comprises at least 15 contiguous nucleotides from a first strand of: AD-39848.1 (SEQ ID NO: 760), or a modified or unmodified variant thereof.

[1123] A RNAi agent comprising a first strand and a second strand, wherein the first strand comprises at least 15 contiguous nucleotides from a first strand of: AD-39854.1 (SEQ ID NO: 761), or a modified or unmodified variant thereof.

[1124] A RNAi agent comprising a first strand and a second strand, wherein the first strand comprises at least 15 contiguous nucleotides from a first strand of: AD-39860.1 (SEQ ID NO: 762), or a modified or unmodified variant thereof.

[1125] A RNAi agent comprising a first strand and a second strand, wherein the first strand comprises at least 15 contiguous nucleotides from a first strand of: AD-39866.1 (SEQ ID NO: 763), or a modified or unmodified variant thereof.

[1126] A RNAi agent comprising a first strand and a second strand, wherein the first strand comprises at least 15 contiguous nucleotides from a first strand of: AD-39992.1 (SEQ ID NO: 764), or a modified or unmodified variant thereof.

[1127] A RNAi agent comprising a first strand and a second strand, wherein the first strand comprises at least 15 contiguous nucleotides from a first strand of: AD-39998.1 (SEQ ID NO: 765), or a modified or

[1128] A RNAi agent comprising a first strand and a second strand, wherein the first strand comprises at least 15 contiguous nucleotides from a first strand of: AD-40004.1 (SEQ ID NO: 766), or a modified or unmodified variant thereof.

[1129] A RNAi agent comprising a first strand and a second strand, wherein the first strand comprises at least 15 contiguous nucleotides from a first strand of: AD-40010.1 (SEQ ID NO: 767), or a modified or unmodified variant thereof.

[1130] A RNAi agent comprising a first strand and a second strand, wherein the first strand comprises at least 15 contiguous nucleotides from a first strand of: AD-40016.1 (SEQ ID NO: 768), or a modified or unmodified variant thereof.

[1131] A RNAi agent comprising a first strand and a second strand, wherein the first strand comprises at least 15 contiguous nucleotides from a first strand of: AD-40022.1 (SEQ ID NO: 769), or a modified or unmodified variant thereof.

[1132] A RNAi agent comprising a first strand and a second strand, wherein the first strand comprises at least 15 contiguous nucleotides from a first strand of: AD-40028.1 (SEQ ID NO: 770), or a modified or unmodified variant thereof.

[1133] A RNAi agent comprising a first strand and a second strand, wherein the first strand comprises at least 15 contiguous nucleotides from a first strand of: AD-40034.1 (SEQ ID NO: 771), or a modified or unmodified variant thereof.

[1134] A RNAi agent comprising a first strand and a second strand, wherein the first strand comprises at least 15 contiguous nucleotides from a first strand of: AD-39999.1 (SEQ ID NO: 772), or a modified or unmodified variant thereof.

[1135] A RNAi agent comprising a first strand and a second strand, wherein the first strand comprises at least 15 contiguous nucleotides from a first strand of: AD-40005.1 (SEQ ID NO: 773), or a modified or unmodified variant thereof.

[1136] A RNAi agent comprising a first strand and a second strand, wherein the first strand comprises at least 15 contiguous nucleotides from a first strand of: AD-40011.1 (SEQ ID NO: 774), or a modified or unmodified variant thereof.

[1137] A RNAi agent comprising a first strand and a second strand, wherein the first strand comprises at least 15 contiguous nucleotides from a first strand of: AD-40017.1 (SEQ ID NO: 775), or a modified or unmodified variant thereof.

[1138] A RNAi agent comprising a first strand and a second strand, wherein the first strand comprises at least 15 contiguous nucleotides from a first strand of: AD-40029.1 (SEQ ID NO: 776), or a modified or unmodified variant thereof.

[1139] A RNAi agent comprising a first strand and a second strand, wherein the first strand comprises at least 15 contiguous nucleotides from a first strand of: AD-40035.1 (SEQ ID NO: 777), or a modified or unmodified variant thereof.

[1140] A RNAi agent comprising a first strand and a second strand, wherein the first strand comprises at least 15 contiguous nucleotides from a first strand of: AD-39994.1 (SEQ ID NO: 778), or a modified or unmodified variant thereof.

[1141] A RNAi agent comprising a first strand and a second strand, wherein the first strand comprises at least 15 contiguous nucleotides from a first strand of: AD-40000.1 (SEQ ID NO: 779), or a modified or unmodified variant thereof.

[1142] A RNAi agent comprising a first strand and a second strand, wherein the first strand comprises at least 15 contiguous nucleotides from a first strand of: AD-40006.1 (SEQ ID NO: 780), or a modified or unmodified variant thereof.

[1143] A RNAi agent comprising a first strand and a second strand, wherein the first strand comprises at least 15 contiguous nucleotides from a first strand of: AD-40012.1 (SEQ ID NO: 781), or a modified or unmodified variant thereof.

[1144] A RNAi agent comprising a first strand and a second strand, wherein the first strand comprises at least 15 contiguous nucleotides from a first strand of: AD-40018.1 (SEQ ID NO: 782), or a modified or unmodified variant thereof.

[1145] A RNAi agent comprising a first strand and a second strand, wherein the first strand comprises at least 15 contiguous nucleotides from a first strand of: AD-40024.1 (SEQ ID NO: 783), or a modified or unmodified variant thereof.

[1146] A RNAi agent comprising a first strand and a second strand, wherein the first strand comprises at least 15 contiguous nucleotides from a first strand of: AD-40030.1 (SEQ ID NO: 784), or a modified or unmodified variant thereof.

[1147] A RNAi agent comprising a first strand and a second strand, wherein the first strand comprises at least 15 contiguous nucleotides from a first strand of: AD-40036.1 (SEQ ID NO: 785), or a modified or unmodified variant thereof.

[1148] A RNAi agent comprising a first strand and a second strand, wherein the first strand comprises at least 15 contiguous nucleotides from a first strand of: AD-39995.1 (SEQ ID NO: 786), or a modified or unmodified variant thereof.

[1149] A RNAi agent comprising a first strand and a second strand, wherein the first strand comprises at least 15 contiguous nucleotides from a first strand of: AD-40001.1 (SEQ ID NO: 787), or a modified or unmodified variant thereof.

[1150] A RNAi agent comprising a first strand and a second strand, wherein the first strand comprises at least 15 contiguous nucleotides from a first strand of: AD-40007.1 (SEQ ID NO: 788), or a modified or unmodified variant thereof.

[1151] A RNAi agent comprising a first strand and a second strand, wherein the first strand comprises at least 15 contiguous nucleotides from a first strand of: AD-40013.1 (SEQ ID NO: 789), or a modified or unmodified variant thereof.

[1152] A RNAi agent comprising a first strand and a second strand, wherein the first strand comprises at least 15 contiguous nucleotides from a first strand of: AD-40019.1 (SEQ ID NO: 790), or a modified or unmodified variant thereof.

[1153] A RNAi agent comprising a first strand and a second strand, wherein the first strand comprises at least 15 contiguous nucleotides from a first strand of: AD-40025.1 (SEQ ID NO: 791), or a modified or unmodified variant thereof.

[1154] A RNAi agent comprising a first strand and a second strand, wherein the first strand comprises at least 15 contiguous nucleotides from a first strand of: AD-40031.1 (SEQ ID NO: 792), or a modified or unmodified variant thereof.

[1155] A RNAi agent comprising a first strand and a second strand, wherein the first strand comprises at least 15 contiguous nucleotides from a first strand of: AD-40037.1 (SEQ ID NO: 793), or a modified or unmodified variant thereof.

[1156] A RNAi agent comprising a first strand and a second strand, wherein the first strand comprises at least 15 contiguous nucleotides from a first strand of: AD-39996.1 (SEQ ID NO: 794), or a modified or unmodified variant thereof.

[1157] A RNAi agent comprising a first strand and a second strand, wherein the first strand comprises at least 15 contiguous nucleotides from a first strand of: AD-40002.1 (SEQ ID NO: 795), or a modified or unmodified variant thereof.

[1158] A RNAi agent comprising a first strand and a second strand, wherein the first strand comprises at least 15 contiguous nucleotides from a first strand of: AD-40008.1 (SEQ ID NO: 796), or a modified or unmodified variant thereof.

[1159] A RNAi agent comprising a first strand and a second strand, wherein the first strand comprises at least 15 contiguous nucleotides from a first strand of: AD-40014.1 (SEQ ID NO: 797), or a modified or unmodified variant thereof.

[1160] A RNAi agent comprising a first strand and a second strand, wherein the first strand comprises at least 15 contiguous nucleotides from a first strand of: AD-40020.1 (SEQ ID NO: 798), or a modified or unmodified variant thereof.

[1161] A RNAi agent comprising a first strand and a second strand, wherein the first strand comprises at least 15 contiguous nucleotides from a first strand of: AD-40026.1 (SEQ ID NO: 799), or a modified or unmodified variant thereof.

[1162] A RNAi agent comprising a first strand and a second strand, wherein the first strand comprises at least 15 contiguous nucleotides from a first strand of: AD-40032.1 (SEQ ID NO: 800), or a modified or unmodified variant thereof.

[1163] A RNAi agent comprising a first strand and a second strand, wherein the first strand comprises at least 15 contiguous nucleotides from a first strand of: AD-40038.1 (SEQ ID NO: 801), or a modified or unmodified variant thereof.

[1164] A RNAi agent comprising a first strand and a second strand, wherein the first strand comprises at least 15 contiguous nucleotides from a first strand of: AD-39997.1 (SEQ ID NO: 802), or a modified or unmodified variant thereof.

[1165] A RNAi agent comprising a first strand and a second strand, wherein the first strand comprises at least 15 contiguous nucleotides from a first strand of: AD-40009.1 (SEQ ID NO: 803), or a modified or unmodified variant thereof.

[1166] A RNAi agent comprising a first strand and a second strand, wherein the first strand comprises at least 15 contiguous nucleotides from a first strand of: AD-40015.1 (SEQ ID NO: 804), or a modified or unmodified variant thereof.

[1167] A RNAi agent comprising a first strand and a second strand, wherein the first strand comprises at least 15 contiguous nucleotides from a first strand of: AD-40021.1 (SEQ ID NO: 805), or a modified or

[1168] A RNAi agent comprising a first strand and a second strand, wherein the first strand comprises at least 15 contiguous nucleotides from a first strand of: AD-40027.1 (SEQ ID NO: 806), or a modified or unmodified variant thereof.

[1169] A RNAi agent comprising a first strand and a second strand, wherein the first strand comprises at least 15 contiguous nucleotides from a first strand of: AD-40033.1 (SEQ ID NO: 807), or a modified or unmodified variant thereof.

[1170] A RNAi agent comprising a first strand and a second strand, wherein the first strand comprises at least 15 contiguous nucleotides from a first strand of: AD-40039.1 (SEQ ID NO: 808), or a modified or unmodified variant thereof.

[1171] A RNAi agent comprising a first strand and a second strand, wherein the first strand comprises at least 15 contiguous nucleotides from a first strand of: AD-40045.1 (SEQ ID NO: 809), or a modified or unmodified variant thereof.

[1172] A RNAi agent comprising a first strand and a second strand, wherein the first strand comprises at least 15 contiguous nucleotides from a first strand of: AD-40051.1 (SEQ ID NO: 810), or a modified or unmodified variant thereof.

[1173] A RNAi agent comprising a first strand and a second strand, wherein the first strand comprises at least 15 contiguous nucleotides from a first strand of: AD-40057.1 (SEQ ID NO: 811), or a modified or unmodified variant thereof.

[1174] A RNAi agent comprising a first strand and a second strand, wherein the first strand comprises at least 15 contiguous nucleotides from a first strand of: AD-40063.1 (SEQ ID NO: 812), or a modified or unmodified variant thereof.

[1175] A RNAi agent comprising a first strand and a second strand, wherein the first strand comprises at least 15 contiguous nucleotides from a first strand of: AD-40069.1 (SEQ ID NO: 813), or a modified or unmodified variant thereof.

[1176] A RNAi agent comprising a first strand and a second strand, wherein the first strand comprises at least 15 contiguous nucleotides from a first strand of: AD-40075.1 (SEQ ID NO: 814), or a modified or unmodified variant thereof.

[1177] A RNAi agent comprising a first strand and a second strand, wherein the first strand comprises at least 15 contiguous nucleotides from a first strand of: AD-40081.1 (SEQ ID NO: 815), or a modified or unmodified variant thereof.

[1178] A RNAi agent comprising a first strand and a second strand, wherein the first strand comprises at least 15 contiguous nucleotides from a first strand of: AD-40040.1 (SEQ ID NO: 816), or a modified or unmodified variant thereof.

[1179] A RNAi agent comprising a first strand and a second strand, wherein the first strand comprises at least 15 contiguous nucleotides from a first strand of: AD-40046.1 (SEQ ID NO: 817), or a modified or unmodified variant thereof.

[1180] A RNAi agent comprising a first strand and a second strand, wherein the first strand comprises at least 15 contiguous nucleotides from a first strand of: AD-40052.1 (SEQ ID NO: 818), or a modified or unmodified variant thereof.

[1181] A RNAi agent comprising a first strand and a second strand, wherein the first strand comprises at least 15 contiguous nucleotides from a first strand of: AD-40058.1 (SEQ ID NO: 819), or a modified or unmodified variant thereof.

[1182] A RNAi agent comprising a first strand and a second strand, wherein the first strand comprises at least 15 contiguous nucleotides from a first strand of: AD-40064.1 (SEQ ID NO: 820), or a modified or unmodified variant thereof.

[1183] A RNAi agent comprising a first strand and a second strand, wherein the first strand comprises at least 15 contiguous nucleotides from a first strand of: AD-40070.1 (SEQ ID NO: 821), or a modified or unmodified variant thereof.

[1184] A RNAi agent comprising a first strand and a second strand, wherein the first strand comprises at least 15 contiguous nucleotides from a first strand of: AD-40076.1 (SEQ ID NO: 822), or a modified or unmodified variant thereof.

[1185] A RNAi agent comprising a first strand and a second strand, wherein the first strand comprises at least 15 contiguous nucleotides from a first strand of: AD-40082.1 (SEQ ID NO: 823), or a modified or unmodified variant thereof.

[1186] A RNAi agent comprising a first strand and a second strand, wherein the first strand comprises at least 15 contiguous nucleotides from a first strand of: AD-40041.1 (SEQ ID NO: 824), or a modified or unmodified variant thereof.

[1187] A RNAi agent comprising a first strand and a second strand, wherein the first strand comprises at least 15 contiguous nucleotides from a first strand of: AD-40047.1 (SEQ ID NO: 825), or a modified or unmodified variant thereof.

[1188] A RNAi agent comprising a first strand and a second strand, wherein the first strand comprises at least 15 contiguous nucleotides from a first strand of: AD-40053.1 (SEQ ID NO: 826), or a modified or unmodified variant thereof.

[1189] A RNAi agent comprising a first strand and a second strand, wherein the first strand comprises at least 15 contiguous nucleotides from a first strand of: AD-40059.1 (SEQ ID NO: 827), or a modified or unmodified variant thereof.

[1190] A RNAi agent comprising a first strand and a second strand, wherein the first strand comprises at least 15 contiguous nucleotides from a first strand of: AD-40065.1 (SEQ ID NO: 828), or a modified or unmodified variant thereof.

[1191] A RNAi agent comprising a first strand and a second strand, wherein the first strand comprises at least 15 contiguous nucleotides from a first strand of: AD-40071.1 (SEQ ID NO: 829), or a modified or unmodified variant thereof.

[1192] A RNAi agent comprising a first strand and a second strand, wherein the first strand comprises at least 15 contiguous nucleotides from a first strand of: AD-40077.1 (SEQ ID NO: 830), or a modified or unmodified variant thereof.

[1193] A RNAi agent comprising a first strand and a second strand, wherein the first strand comprises at least 15 contiguous nucleotides from a first strand of: AD-40083.1 (SEQ ID NO: 831), or a modified or unmodified variant thereof.

[1194] A RNAi agent comprising a first strand and a second strand, wherein the first strand comprises at least 15 contiguous nucleotides from a first strand of: AD-40042.1 (SEQ ID NO: 832), or a modified or unmodified variant thereof.

[1195] A RNAi agent comprising a first strand and a second strand, wherein the first strand comprises at least 15 contiguous nucleotides from a first strand of: AD-40048.1 (SEQ ID NO: 833), or a modified or unmodified variant thereof.

[1196] A RNAi agent comprising a first strand and a second strand, wherein the first strand comprises at least 15 contiguous nucleotides from a first strand of: AD-40054.1 (SEQ ID NO: 834), or a modified or unmodified variant thereof.

[1197] A RNAi agent comprising a first strand and a second strand, wherein the first strand comprises at least 15 contiguous nucleotides from a first strand of: AD-40060.1 (SEQ ID NO: 835), or a modified or unmodified variant thereof.

[1198] A RNAi agent comprising a first strand and a second strand, wherein the first strand comprises at least 15 contiguous nucleotides from a first strand of: AD-40066.1 (SEQ ID NO: 836), or a modified or unmodified variant thereof.

[1199] A RNAi agent comprising a first strand and a second strand, wherein the first strand comprises at least 15 contiguous nucleotides from a first strand of: AD-40072.1 (SEQ ID NO: 837), or a modified or unmodified variant thereof.

[1200] A RNAi agent comprising a first strand and a second strand, wherein the first strand comprises at least 15 contiguous nucleotides from a first strand of: AD-40078.1 (SEQ ID NO: 838), or a modified or unmodified variant thereof.

[1201] A RNAi agent comprising a first strand and a second strand, wherein the first strand comprises at least 15 contiguous nucleotides from a first strand of: AD-40084.1 (SEQ ID NO: 839), or a modified or unmodified variant thereof.

[1202] A RNAi agent comprising a first strand and a second strand, wherein the first strand comprises at least 15 contiguous nucleotides from a first strand of: AD-40043.1 (SEQ ID NO: 840), or a modified or unmodified variant thereof.

[1203] A RNAi agent comprising a first strand and a second strand, wherein the first strand comprises at least 15 contiguous nucleotides from a first strand of: AD-40049.1 (SEQ ID NO: 841), or a modified or unmodified variant thereof.

[1204] A RNAi agent comprising a first strand and a second strand, wherein the first strand comprises at least 15 contiguous nucleotides from a first strand of: AD-40055.1 (SEQ ID NO: 842), or a modified or unmodified variant thereof.

[1205] A RNAi agent comprising a first strand and a second strand, wherein the first strand comprises at least 15 contiguous nucleotides from a first strand of: AD-40061.1 (SEQ ID NO: 843), or a modified or unmodified variant thereof.

[1206] A RNAi agent comprising a first strand and a second strand, wherein the first strand comprises at least 15 contiguous nucleotides from a first strand of: AD-40067.1 (SEQ ID NO: 844), or a modified or unmodified variant thereof.

[1207] A RNAi agent comprising a first strand and a second strand, wherein the first strand comprises at least 15 contiguous nucleotides from a first strand of: AD-40073.1 (SEQ ID NO: 845), or a modified or

[1208] A RNAi agent comprising a first strand and a second strand, wherein the first strand comprises at least 15 contiguous nucleotides from a first strand of: AD-40079.1 (SEQ ID NO: 846), or a modified or unmodified variant thereof.

[1209] A RNAi agent comprising a first strand and a second strand, wherein the first strand comprises at least 15 contiguous nucleotides from a first strand of: AD-40085.1 (SEQ ID NO: 847), or a modified or unmodified variant thereof.

[1210] A RNAi agent comprising a first strand and a second strand, wherein the first strand comprises at least 15 contiguous nucleotides from a first strand of: AD-40044.1 (SEQ ID NO: 848), or a modified or unmodified variant thereof.

[1211] A RNAi agent comprising a first strand and a second strand, wherein the first strand comprises at least 15 contiguous nucleotides from a first strand of: AD-40050.1 (SEQ ID NO: 849), or a modified or unmodified variant thereof.

[1212] A RNAi agent comprising a first strand and a second strand, wherein the first strand comprises at least 15 contiguous nucleotides from a first strand of: AD-40056.1 (SEQ ID NO: 850), or a modified or unmodified variant thereof.

[1213] A RNAi agent comprising a first strand and a second strand, wherein the first strand comprises at least 15 contiguous nucleotides from a first strand of: AD-40062.1 (SEQ ID NO: 851), or a modified or unmodified variant thereof.

[1214] A RNAi agent comprising a first strand and a second strand, wherein the first strand comprises at least 15 contiguous nucleotides from a first strand of: AD-40068.1 (SEQ ID NO: 852), or a modified or unmodified variant thereof.

[1215] A RNAi agent comprising a first strand and a second strand, wherein the first strand comprises at least 15 contiguous nucleotides from a first strand of: AD-40074.1 (SEQ ID NO: 853), or a modified or unmodified variant thereof.

[1216] A RNAi agent comprising a first strand and a second strand, wherein the first strand comprises at least 15 contiguous nucleotides from a first strand of: AD-40080.1 (SEQ ID NO: 854), or a modified or unmodified variant thereof.

[1217] A RNAi agent comprising a first strand and a second strand, wherein the first strand comprises at least 15 contiguous nucleotides from a first strand of: AD-39720.1 (SEQ ID NOs: 1754), or a modified or unmodified variant thereof.

[1218] A RNAi agent comprising a first strand and a second strand, wherein the first strand comprises at least 15 contiguous nucleotides from a first strand of: AD-39706.1 (SEQ ID NOs: 1755), or a modified or unmodified variant thereof.

[1219] A RNAi agent comprising a first strand and a second strand, wherein the first strand comprises at least 15 contiguous nucleotides from a first strand of: AD-39712.1 (SEQ ID NOs: 1756), or a modified or unmodified variant thereof.

[1220] A RNAi agent comprising a first strand and a second strand, wherein the first strand comprises at least 15 contiguous nucleotides from a first strand of: AD-39760.1 (SEQ ID NOs: 1757), or a modified or unmodified variant thereof.

[1221] A RNAi agent comprising a first strand and a second strand, wherein the first strand comprises at least 15 contiguous nucleotides from a first strand of: AD-39732.1 (SEQ ID NOs: 1758), or a modified or unmodified variant thereof.

[1222] A RNAi agent comprising a first strand and a second strand, wherein the first strand comprises at least 15 contiguous nucleotides from a first strand of: AD-35541.4 (SEQ ID NOs: 1759), or a modified or unmodified variant thereof.

[1223] A RNAi agent comprising a first strand and a second strand, wherein the first strand comprises at least 15 contiguous nucleotides from a first strand of: AD-39735.1 or hs_KRAS_321_A22S26 (SEQ ID NOs: 1760), or a modified or unmodified variant thereof.

[1224] A RNAi agent comprising a first strand and a second strand, wherein the first strand comprises at least 15 contiguous nucleotides from a first strand of: AD-39741.1, or modified or unmodified variants thereof. hs_KRAS_322_A22S26 (SEQ ID NOs: 1761), or a modified or unmodified variant thereof.

[1225] A RNAi agent comprising a first strand and a second strand, wherein the first strand comprises at least 15 contiguous nucleotides from a first strand of: AD-39778.1 (SEQ ID NOs: 1762), or a modified or unmodified variant thereof.

[1226] A RNAi agent comprising a first strand and a second strand, wherein the first strand comprises at least 15 contiguous nucleotides from a first strand of: AD-39790.1 (SEQ ID NOs: 1763), or a modified or unmodified variant thereof.

[1227] A RNAi agent comprising a first strand and a second strand, wherein the first strand comprises at least 15 contiguous nucleotides from a first strand of: AD-39822.1 (SEQ ID NOs: 1764), or a modified or unmodified variant thereof.

[1228] A RNAi agent comprising a first strand and a second strand, wherein the first strand comprises at least 15 contiguous nucleotides from a first strand of: AD-35609.4 (SEQ ID NOs: 1765), or a modified or unmodified variant thereof.

[1229] A RNAi agent comprising a first strand and a second strand, wherein the first strand comprises at least 15 contiguous nucleotides from a first strand of: AD-35581.4 (SEQ ID NOs: 1766), or a modified or unmodified variant thereof.

[1230] A RNAi agent comprising a first strand and a second strand, wherein the first strand comprises at least 15 contiguous nucleotides from a first strand of: AD-39845.1 (SEQ ID NOs: 1767), or a modified or unmodified variant thereof.

[1231] A RNAi agent comprising a first strand and a second strand, wherein the first strand comprises at least 15 contiguous nucleotides from a first strand of: AD-39858.1 (SEQ ID NOs: 1768), or a modified or unmodified variant thereof.

[1232] A RNAi agent comprising a first strand and a second strand, wherein the first strand comprises at least 15 contiguous nucleotides from a first strand of: AD-39870.1 (SEQ ID NOs: 1769), or a modified or unmodified variant thereof.

[1233] A RNAi agent comprising a first strand and a second strand, wherein the first strand comprises at least 15 contiguous nucleotides from a first strand of: AD-35576.4 (SEQ ID NOs: 1770), or a modified or unmodified variant thereof.

[1234] A RNAi agent comprising a first strand and a second strand, wherein the first strand comprises at least 15 contiguous nucleotides from a first strand of: AD-35588.4 (SEQ ID NOs: 1771), or a modified or unmodified variant thereof.

[1235] A RNAi agent comprising a first strand and a second strand, wherein the first strand comprises at least 15 contiguous nucleotides from a first strand of: AD-35600.1 (SEQ ID NOs: 1772), or a modified or unmodified variant thereof.

[1236] A RNAi agent comprising a first strand and a second strand, wherein the first strand comprises at least 15 contiguous nucleotides from a first strand of: AD-35606.1 (SEQ ID NOs: 1773), or a modified or unmodified variant thereof.

[1237] A RNAi agent comprising a first strand and a second strand, wherein the first strand comprises at least 15 contiguous nucleotides from a first strand of: AD-38151.1 (SEQ ID NOs: 1774), or a modified or unmodified variant thereof.

[1238] A RNAi agent comprising a first strand and a second strand, wherein the first strand comprises at least 15 contiguous nucleotides from a first strand of: AD-38163.1 (SEQ ID NOs: 1775), or a modified or unmodified variant thereof.

[1239] A RNAi agent comprising a first strand and a second strand, wherein the first strand comprises at least 15 contiguous nucleotides from a first strand of: AD-39999.1 (SEQ ID NOs: 1776), or a modified or unmodified variant thereof.

[1240] A RNAi agent comprising a first strand and a second strand, wherein the first strand comprises at least 15 contiguous nucleotides from a first strand of: AD-38159.1 or hs_KRAS_528_A22S26 (SEQ ID NOs: 1777), or a modified or unmodified variant thereof.

[1241] A RNAi agent comprising a first strand and a second strand, wherein the first strand comprises at least 15 contiguous nucleotides from a first strand of: AD-38130.1 or hs_KRAS_531_A22S26 (SEQ ID NOs: 1778), or a modified or unmodified variant thereof.

[1242] A RNAi agent comprising a first strand and a second strand, wherein the first strand comprises at least 15 contiguous nucleotides from a first strand of: AD-38136.1 (SEQ ID NOs: 1779), or a modified or unmodified variant thereof.

[1243] A RNAi agent comprising a first strand and a second strand, wherein the first strand comprises at least 15 contiguous nucleotides from a first strand of: AD-40036.1 (SEQ ID NOs: 1780), or a modified or unmodified variant thereof.

[1244] A RNAi agent comprising a first strand and a second strand, wherein the first strand comprises at least 15 contiguous nucleotides from a first strand of: AD-40008.1 (SEQ ID NOs: 1781), or a modified or unmodified variant thereof.

[1245] A RNAi agent comprising a first strand and a second strand, wherein the first strand comprises at least 15 contiguous nucleotides from a first strand of: AD-40021.1 (SEQ ID NOs: 1782), or a modified or unmodified variant thereof.

[1246] A RNAi agent comprising a first strand and a second strand, wherein the first strand comprises at least 15 contiguous nucleotides from a first strand of: AD-40077.1 (SEQ ID NOs: 1783), or a modified or unmodified variant thereof.

[1247] A RNAi agent comprising a first strand and a second strand, wherein the first strand comprises at least 15 contiguous nucleotides from a first strand of: AD-40072.1 (SEQ ID NOs: 1784), or a modified or unmodified variant thereof.

[1248] A RNAi agent comprising a first strand and a second strand, wherein the first strand comprises at least 15 contiguous nucleotides from a first strand of: AD-40061.1 (SEQ ID NOs: 1785), or a modified or unmodified variant thereof.

[1249] A RNAi agent comprising a first strand and a second strand, wherein the first strand comprises at least 15 contiguous nucleotides from a first strand of: AD-40068.1 (SEQ ID NOs: 1786), or a modified or unmodified variant thereof.

[1250] A RNAi agent comprising a first strand and a second strand, wherein the first strand comprises at least 15 contiguous nucleotides from a first strand of: AD-38131.1 (SEQ ID NOs: 1787), or a modified or unmodified variant thereof.

[1251] A RNAi agent comprising a first strand and a second strand, wherein the first strand comprises at least 15 contiguous nucleotides from a first strand of: AD-38167.1 (SEQ ID NOs: 1788), or a modified or unmodified variant thereof.

[1252] A RNAi agent comprising a first strand and a second strand, wherein the first strand comprises at least 15 contiguous nucleotides from a first strand of: hs_KRAS 1273_A22S26 (SEQ ID NOs: 1789), or a modified or unmodified variant thereof.

[1253] A RNAi agent comprising a first strand and a second strand, wherein the first strand comprises at least 15 contiguous nucleotides from a first strand of: hs_KRAS 2892_A37S26 (SEQ ID NOs: 1790), or a modified or unmodified variant thereof.

[1254] A RNAi agent comprising a first strand and a second strand, wherein the first strand comprises at least 15 contiguous nucleotides from a first strand of: hs_KRAS 4731_A22S26 (SEQ ID NOs: 1791), or a modified or unmodified variant thereof.

### Specific Embodiments Comprising a First Strand of a RNAi Agent Disclosed Herein

[1255] In one embodiment, the present disclosure pertains to a composition comprising any one or more of: a RNAi agent comprising a first and a second strand, wherein the sequence of the first strand is the sequence of a first strand of any RNAi agent from any of Tables 1 to 6, or modified and unmodified variants thereof.

[1256] Thus, in various embodiments, the present disclosure pertains to a composition comprising any one or more of the following: A RNAi agent comprising a first and a second strand, wherein the sequence of the first strand is the sequence of a first strand of: AD-35523.3 (SEQ ID NO: 428), or a modified or unmodified variant thereof.

[1257] A RNAi agent comprising a first and a second strand, wherein the sequence of the first strand is the sequence of a first strand of: AD-35529.1 (SEQ ID NO: 429), or a modified or unmodified variant thereof.

[1258] A RNAi agent comprising a first and a second strand, wherein the sequence of the first strand is the sequence of a first strand of: AD-35535.4 (SEQ ID NO: 430), or a modified or unmodified variant

[1259] A RNAi agent comprising a first and a second strand, wherein the sequence of the first strand is the sequence of a first strand of: AD-35541.4 (SEQ ID NO: 431), or a modified or unmodified variant thereof.

[1260] A RNAi agent comprising a first and a second strand, wherein the sequence of the first strand is the sequence of a first strand of: AD-35547.4 (SEQ ID NO: 432), or a modified or unmodified variant thereof.

[1261] A RNAi agent comprising a first and a second strand, wherein the sequence of the first strand is the sequence of a first strand of: AD-35553.4 (SEQ ID NO: 433), or a modified or unmodified variant thereof.

[1262] A RNAi agent comprising a first and a second strand, wherein the sequence of the first strand is the sequence of a first strand of: AD-35559.4 (SEQ ID NO: 434), or a modified or unmodified variant thereof.

[1263] A RNAi agent comprising a first and a second strand, wherein the sequence of the first strand is the sequence of a first strand of: AD-35565.4 (SEQ ID NO: 435), or a modified or unmodified variant thereof.

[1264] A RNAi agent comprising a first and a second strand, wherein the sequence of the first strand is the sequence of a first strand of: AD-35524.4 (SEQ ID NO: 436), or a modified or unmodified variant thereof.

[1265] A RNAi agent comprising a first and a second strand, wherein the sequence of the first strand is the sequence of a first strand of: AD-35530.4 (SEQ ID NO: 437), or a modified or unmodified variant thereof.

[1266] A RNAi agent comprising a first and a second strand, wherein the sequence of the first strand is the sequence of a first strand of: AD-35536.4 (SEQ ID NO: 438), or a modified or unmodified variant thereof.

[1267] A RNAi agent comprising a first and a second strand, wherein the sequence of the first strand is the sequence of a first strand of: AD-35542.4 (SEQ ID NO: 439), or a modified or unmodified variant thereof.

[1268] A RNAi agent comprising a first and a second strand, wherein the sequence of the first strand is the sequence of a first strand of: AD-35548.4 (SEQ ID NO: 440), or a modified or unmodified variant thereof.

[1269] A RNAi agent comprising a first and a second strand, wherein the sequence of the first strand is the sequence of a first strand of: AD-35554.4 (SEQ ID NO: 441), or a modified or unmodified variant thereof.

[1270] A RNAi agent comprising a first and a second strand, wherein the sequence of the first strand is the sequence of a first strand of: AD-35560.2 (SEQ ID NO: 442), or a modified or unmodified variant thereof.

[1271] A RNAi agent comprising a first and a second strand, wherein the sequence of the first strand is the sequence of a first strand of: AD-35566.4 (SEQ ID NO: 443), or a modified or unmodified variant thereof.

[1272] A RNAi agent comprising a first and a second strand, wherein the sequence of the first strand is the sequence of a first strand of: AD-35525.2 (SEQ ID NO: 444), or a modified or unmodified variant thereof.

[1273] A RNAi agent comprising a first and a second strand, wherein the sequence of the first strand is the sequence of a first strand of: AD-35531.4 (SEQ ID NO: 445), or a modified or unmodified variant thereof.

[1274] A RNAi agent comprising a first and a second strand, wherein the sequence of the first strand is the sequence of a first strand of: AD-35537.4 (SEQ ID NO: 446), or a modified or unmodified variant thereof.

[1275] A RNAi agent comprising a first and a second strand, wherein the sequence of the first strand is the sequence of a first strand of: AD-35543.2 (SEQ ID NO: 447), or a modified or unmodified variant thereof.

[1276] A RNAi agent comprising a first and a second strand, wherein the sequence of the first strand is the sequence of a first strand of: AD-35549.4 (SEQ ID NO: 448), or a modified or unmodified variant thereof.

[1277] A RNAi agent comprising a first and a second strand, wherein the sequence of the first strand is the sequence of a first strand of: AD-35555.4 (SEQ ID NO: 449), or a modified or unmodified variant thereof.

[1278] A RNAi agent comprising a first and a second strand, wherein the sequence of the first strand is the sequence of a first strand of: AD-35561.4 (SEQ ID NO: 450), or a modified or unmodified variant thereof.

[1279] A RNAi agent comprising a first and a second strand, wherein the sequence of the first strand is the sequence of a first strand of: AD-35567.4 (SEQ ID NO: 451), or a modified or unmodified variant thereof.

[1280] A RNAi agent comprising a first and a second strand, wherein the sequence of the first strand is the sequence of a first strand of: AD-35526.4 (SEQ ID NO: 452), or a modified or unmodified variant thereof.

[1281] A RNAi agent comprising a first and a second strand, wherein the sequence of the first strand is the sequence of a first strand of: AD-35532.4 (SEQ ID NO: 453), or a modified or unmodified variant thereof.

[1282] A RNAi agent comprising a first and a second strand, wherein the sequence of the first strand is the sequence of a first strand of: AD-35538.4 (SEQ ID NO: 454), or a modified or unmodified variant thereof.

[1283] A RNAi agent comprising a first and a second strand, wherein the sequence of the first strand is the sequence of a first strand of: AD-35544.4 (SEQ ID NO: 455), or a modified or unmodified variant thereof.

[1284] A RNAi agent comprising a first and a second strand, wherein the sequence of the first strand is the sequence of a first strand of: AD-35550.4 (SEQ ID NO: 456), or a modified or unmodified variant thereof.

[1285] A RNAi agent comprising a first and a second strand, wherein the sequence of the first strand is the sequence of a first strand of: AD-35556.4 (SEQ ID NO: 457), or a modified or unmodified variant thereof.

[1286] A RNAi agent comprising a first and a second strand, wherein the sequence of the first strand is the sequence of a first strand of: AD-35562.4 (SEQ ID NO: 458), or a modified or unmodified variant thereof.

[1287] A RNAi agent comprising a first and a second strand, wherein the sequence of the first strand is the sequence of a first strand of: AD-35568.4 (SEQ ID NO: 459), or a modified or unmodified variant thereof.

[1288] A RNAi agent comprising a first and a second strand, wherein the sequence of the first strand is the sequence of a first strand of: AD-35527.4 (SEQ ID NO: 460), or a modified or unmodified variant thereof.

[1289] A RNAi agent comprising a first and a second strand, wherein the sequence of the first strand is the sequence of a first strand of: AD-35533.4 (SEQ ID NO: 461), or a modified or unmodified variant thereof.

[1290] A RNAi agent comprising a first and a second strand, wherein the sequence of the first strand is the sequence of a first strand of: AD-35539.4 (SEQ ID NO: 462), or a modified or unmodified variant thereof.

[1291] A RNAi agent comprising a first and a second strand, wherein the sequence of the first strand is the sequence of a first strand of: AD-35545.4 (SEQ ID NO: 463), or a modified or unmodified variant thereof.

[1292] A RNAi agent comprising a first and a second strand, wherein the sequence of the first strand is the sequence of a first strand of: AD-35551.4 (SEQ ID NO: 464), or a modified or unmodified variant thereof.

[1293] A RNAi agent comprising a first and a second strand, wherein the sequence of the first strand is the sequence of a first strand of: AD-35563.4 (SEQ ID NO: 465), or a modified or unmodified variant thereof.

[1294] A RNAi agent comprising a first and a second strand, wherein the sequence of the first strand is the sequence of a first strand of: AD-35528.4 (SEQ ID NO: 466), or a modified or unmodified variant thereof.

[1295] A RNAi agent comprising a first and a second strand, wherein the sequence of the first strand is the sequence of a first strand of: AD-35540.4 (SEQ ID NO: 467), or a modified or unmodified variant thereof.

[1296] A RNAi agent comprising a first and a second strand, wherein the sequence of the first strand is the sequence of a first strand of: AD-35546.4 (SEQ ID NO: 468), or a modified or unmodified variant thereof.

[1297] A RNAi agent comprising a first and a second strand, wherein the sequence of the first strand is the sequence of a first strand of: AD-35552.4 (SEQ ID NO: 469), or a modified or unmodified variant thereof.

[1298] A RNAi agent comprising a first and a second strand, wherein the sequence of the first strand is the sequence of a first strand of: AD-35558.4 (SEQ ID NO: 470), or a modified or unmodified variant

[1299] A RNAi agent comprising a first and a second strand, wherein the sequence of the first strand is the sequence of a first strand of: AD-35564.4 (SEQ ID NO: 471), or a modified or unmodified variant thereof.

[1300] A RNAi agent comprising a first and a second strand, wherein the sequence of the first strand is the sequence of a first strand of: AD-35570.4 (SEQ ID NO: 472), or a modified or unmodified variant thereof.

[1301] A RNAi agent comprising a first and a second strand, wherein the sequence of the first strand is the sequence of a first strand of: AD-35571.4 (SEQ ID NO: 473), or a modified or unmodified variant thereof.

[1302] A RNAi agent comprising a first and a second strand, wherein the sequence of the first strand is the sequence of a first strand of: AD-35577.4 (SEQ ID NO: 474), or a modified or unmodified variant thereof.

[1303] A RNAi agent comprising a first and a second strand, wherein the sequence of the first strand is the sequence of a first strand of: AD-35583.4 (SEQ ID NO: 475), or a modified or unmodified variant thereof.

[1304] A RNAi agent comprising a first and a second strand, wherein the sequence of the first strand is the sequence of a first strand of: AD-35589.4 (SEQ ID NO: 476), or a modified or unmodified variant thereof.

[1305] A RNAi agent comprising a first and a second strand, wherein the sequence of the first strand is the sequence of a first strand of: AD-35595.4 (SEQ ID NO: 477), or a modified or unmodified variant thereof.

[1306] A RNAi agent comprising a first and a second strand, wherein the sequence of the first strand is the sequence of a first strand of: AD-35601.4 (SEQ ID NO: 478), or a modified or unmodified variant thereof.

[1307] A RNAi agent comprising a first and a second strand, wherein the sequence of the first strand is the sequence of a first strand of: AD-35607.4 (SEQ ID NO: 479), or a modified or unmodified variant thereof.

[1308] A RNAi agent comprising a first and a second strand, wherein the sequence of the first strand is the sequence of a first strand of: AD-35613.4 (SEQ ID NO: 480), or a modified or unmodified variant thereof.

[1309] A RNAi agent comprising a first and a second strand, wherein the sequence of the first strand is the sequence of a first strand of: AD-35572.4 (SEQ ID NO: 481), or a modified or unmodified variant thereof.

[1310] A RNAi agent comprising a first and a second strand, wherein the sequence of the first strand is the sequence of a first strand of: AD-35578.4 (SEQ ID NO: 482), or a modified or unmodified variant thereof.

[1311] A RNAi agent comprising a first and a second strand, wherein the sequence of the first strand is the sequence of a first strand of: AD-35584.4 (SEQ ID NO: 483), or a modified or unmodified variant thereof.

[1312] A RNAi agent comprising a first and a second strand, wherein the sequence of the first strand is the sequence of a first strand of: AD-35590.4 (SEQ ID NO: 484), or a modified or unmodified variant thereof.

[1313] A RNAi agent comprising a first and a second strand, wherein the sequence of the first strand is the sequence of a first strand of: AD-35596.4 (SEQ ID NO: 485), or a modified or unmodified variant thereof.

[1314] A RNAi agent comprising a first and a second strand, wherein the sequence of the first strand is the sequence of a first strand of: AD-35602.4 (SEQ ID NO: 486), or a modified or unmodified variant thereof.

[1315] A RNAi agent comprising a first and a second strand, wherein the sequence of the first strand is the sequence of a first strand of: AD-35608.4 (SEQ ID NO: 487), or a modified or unmodified variant thereof.

[1316] A RNAi agent comprising a first and a second strand, wherein the sequence of the first strand is the sequence of a first strand of: AD-35614.4 (SEQ ID NO: 488), or a modified or unmodified variant thereof.

[1317] A RNAi agent comprising a first and a second strand, wherein the sequence of the first strand is the sequence of a first strand of: AD-35573.4 (SEQ ID NO: 489), or a modified or unmodified variant thereof.

[1318] A RNAi agent comprising a first and a second strand, wherein the sequence of the first strand is the sequence of a first strand of: AD-35579.4 (SEQ ID NO: 490), or a modified or unmodified variant thereof.

[1319] A RNAi agent comprising a first and a second strand, wherein the sequence of the first strand is the sequence of a first strand of: AD-35585.4 (SEQ ID NO: 491), or a modified or unmodified variant thereof.

[1320] A RNAi agent comprising a first and a second strand, wherein the sequence of the first strand is the sequence of a first strand of: AD-35591.4 (SEQ ID NO: 492), or a modified or unmodified variant thereof.

[1321] A RNAi agent comprising a first and a second strand, wherein the sequence of the first strand is the sequence of a first strand of: AD-35597.4 (SEQ ID NO: 493), or a modified or unmodified variant thereof.

[1322] A RNAi agent comprising a first and a second strand, wherein the sequence of the first strand is the sequence of a first strand of: AD-35603.4 (SEQ ID NO: 494), or a modified or unmodified variant thereof.

[1323] A RNAi agent comprising a first and a second strand, wherein the sequence of the first strand is the sequence of a first strand of: AD-35609.4 (SEQ ID NO: 495), or a modified or unmodified variant thereof.

[1324] A RNAi agent comprising a first and a second strand, wherein the sequence of the first strand is the sequence of a first strand of: AD-35615.4 (SEQ ID NO: 496), or a modified or unmodified variant thereof.

[1325] A RNAi agent comprising a first and a second strand, wherein the sequence of the first strand is the sequence of a first strand of: AD-35574.4 (SEQ ID NO: 497), or a modified or unmodified variant thereof.

[1326] A RNAi agent comprising a first and a second strand, wherein the sequence of the first strand is the sequence of a first strand of: AD-35580.1 (SEQ ID NO: 498), or a modified or unmodified variant thereof.

[1327] A RNAi agent comprising a first and a second strand, wherein the sequence of the first strand is the sequence of a first strand of: AD-35586.4 (SEQ ID NO: 499), or a modified or unmodified variant thereof.

[1328] A RNAi agent comprising a first and a second strand, wherein the sequence of the first strand is the sequence of a first strand of: AD-35592.4 (SEQ ID NO: 500), or a modified or unmodified variant thereof.

[1329] A RNAi agent comprising a first and a second strand, wherein the sequence of the first strand is the sequence of a first strand of: AD-35598.4 (SEQ ID NO: 501), or a modified or unmodified variant thereof.

[1330] A RNAi agent comprising a first and a second strand, wherein the sequence of the first strand is the sequence of a first strand of: AD-35604.4 (SEQ ID NO: 502), or a modified or unmodified variant thereof.

[1331] A RNAi agent comprising a first and a second strand, wherein the sequence of the first strand is the sequence of a first strand of: AD-35610.4 (SEQ ID NO: 503), or a modified or unmodified variant thereof.

[1332] A RNAi agent comprising a first and a second strand, wherein the sequence of the first strand is the sequence of a first strand of: AD-35616.4 (SEQ ID NO: 504), or a modified or unmodified variant thereof.

[1333] A RNAi agent comprising a first and a second strand, wherein the sequence of the first strand is the sequence of a first strand of: AD-35575.4 (SEQ ID NO: 505), or a modified or unmodified variant thereof.

[1334] A RNAi agent comprising a first and a second strand, wherein the sequence of the first strand is the sequence of a first strand of: AD-35581.4 (SEQ ID NO: 506), or a modified or unmodified variant thereof.

[1335] A RNAi agent comprising a first and a second strand, wherein the sequence of the first strand is the sequence of a first strand of: AD-35587.4 (SEQ ID NO: 507), or a modified or unmodified variant thereof.

[1336] A RNAi agent comprising a first and a second strand, wherein the sequence of the first strand is the sequence of a first strand of: AD-35593.4 (SEQ ID NO: 508), or a modified or unmodified variant thereof.

[1337] A RNAi agent comprising a first and a second strand, wherein the sequence of the first strand is the sequence of a first strand of: AD-35599.4 (SEQ ID NO: 509), or a modified or unmodified variant thereof.

[1338] A RNAi agent comprising a first and a second strand, wherein the sequence of the first strand is the sequence of a first strand of: AD-35605.4 (SEQ ID NO: 510), or a modified or unmodified variant

[1339] A RNAi agent comprising a first and a second strand, wherein the sequence of the first strand is the sequence of a first strand of: AD-35611.4 (SEQ ID NO: 511), or a modified or unmodified variant thereof.

[1340] A RNAi agent comprising a first and a second strand, wherein the sequence of the first strand is the sequence of a first strand of: AD-35617.4 (SEQ ID NO: 512), or a modified or unmodified variant thereof.

[1341] A RNAi agent comprising a first and a second strand, wherein the sequence of the first strand is the sequence of a first strand of: AD-35576.4 (SEQ ID NO: 513), or a modified or unmodified variant thereof.

[1342] A RNAi agent comprising a first and a second strand, wherein the sequence of the first strand is the sequence of a first strand of: AD-35588.4 (SEQ ID NO: 514), or a modified or unmodified variant thereof.

[1343] A RNAi agent comprising a first and a second strand, wherein the sequence of the first strand is the sequence of a first strand of: AD-35667.1 (SEQ ID NO: 515), or a modified or unmodified variant thereof.

[1344] A RNAi agent comprising a first and a second strand, wherein the sequence of the first strand is the sequence of a first strand of: AD-35673.1 (SEQ ID NO: 516), or a modified or unmodified variant thereof.

[1345] A RNAi agent comprising a first and a second strand, wherein the sequence of the first strand is the sequence of a first strand of: AD-35679.1 (SEQ ID NO: 517), or a modified or unmodified variant thereof.

[1346] A RNAi agent comprising a first and a second strand, wherein the sequence of the first strand is the sequence of a first strand of: AD-35685.1 (SEQ ID NO: 518), or a modified or unmodified variant thereof.

[1347] A RNAi agent comprising a first and a second strand, wherein the sequence of the first strand is the sequence of a first strand of: AD-35691.1 (SEQ ID NO: 519), or a modified or unmodified variant thereof.

[1348] A RNAi agent comprising a first and a second strand, wherein the sequence of the first strand is the sequence of a first strand of: AD-35557.1 (SEQ ID NO: 520), or a modified or unmodified variant thereof.

[1349] A RNAi agent comprising a first and a second strand, wherein the sequence of the first strand is the sequence of a first strand of: AD-35618.1 (SEQ ID NO: 521), or a modified or unmodified variant thereof.

[1350] A RNAi agent comprising a first and a second strand, wherein the sequence of the first strand is the sequence of a first strand of: AD-35569.1 (SEQ ID NO: 522), or a modified or unmodified variant thereof.

[1351] A RNAi agent comprising a first and a second strand, wherein the sequence of the first strand is the sequence of a first strand of: AD-35534.1 (SEQ ID NO: 523), or a modified or unmodified variant thereof.

[1352] A RNAi agent comprising a first and a second strand, wherein the sequence of the first strand is the sequence of a first strand of: AD-35582.1 (SEQ ID NO: 524), or a modified or unmodified variant thereof.

[1353] A RNAi agent comprising a first and a second strand, wherein the sequence of the first strand is the sequence of a first strand of: AD-35594.1 (SEQ ID NO: 525), or a modified or unmodified variant thereof.

[1354] A RNAi agent comprising a first and a second strand, wherein the sequence of the first strand is the sequence of a first strand of: AD-35600.1 (SEQ ID NO: 526), or a modified or unmodified variant thereof.

[1355] A RNAi agent comprising a first and a second strand, wherein the sequence of the first strand is the sequence of a first strand of: AD-35606.1 (SEQ ID NO: 527), or a modified or unmodified variant thereof.

[1356] A RNAi agent comprising a first and a second strand, wherein the sequence of the first strand is the sequence of a first strand of: AD-35612.1 (SEQ ID NO: 528), or a modified or unmodified variant thereof.

[1357] A RNAi agent comprising a first and a second strand, wherein the sequence of the first strand is the sequence of a first strand of: AD-38127.1 (SEQ ID NO: 529), or a modified or unmodified variant thereof.

[1358] A RNAi agent comprising a first and a second strand, wherein the sequence of the first strand is the sequence of a first strand of: AD-38133.1 (SEQ ID NO: 530), or a modified or unmodified variant thereof.

[1359] A RNAi agent comprising a first and a second strand, wherein the sequence of the first strand is the sequence of a first strand of: AD-38139.1 (SEQ ID NO: 531), or a modified or unmodified variant thereof.

[1360] A RNAi agent comprising a first and a second strand, wherein the sequence of the first strand is the sequence of a first strand of: AD-38145.1 (SEQ ID NO: 532), or a modified or unmodified variant thereof.

[1361] A RNAi agent comprising a first and a second strand, wherein the sequence of the first strand is the sequence of a first strand of: AD-38151.1 (SEQ ID NO: 533), or a modified or unmodified variant thereof.

[1362] A RNAi agent comprising a first and a second strand, wherein the sequence of the first strand is the sequence of a first strand of: AD-38157.1 (SEQ ID NO: 534), or a modified or unmodified variant thereof.

[1363] A RNAi agent comprising a first and a second strand, wherein the sequence of the first strand is the sequence of a first strand of: AD-38163.1 (SEQ ID NO: 535), or a modified or unmodified variant thereof.

[1364] A RNAi agent comprising a first and a second strand, wherein the sequence of the first strand is the sequence of a first strand of: AD-38169.1 (SEQ ID NO: 536), or a modified or unmodified variant thereof.

[1365] A RNAi agent comprising a first and a second strand, wherein the sequence of the first strand is the sequence of a first strand of: AD-38128.1 (SEQ ID NO: 537), or a modified or unmodified variant thereof.

[1366] A RNAi agent comprising a first and a second strand, wherein the sequence of the first strand is the sequence of a first strand of: AD-38134.1 (SEQ ID NO: 538), or a modified or unmodified variant thereof.

[1367] A RNAi agent comprising a first and a second strand, wherein the sequence of the first strand is the sequence of a first strand of: AD-38140.1 (SEQ ID NO: 539), or a modified or unmodified variant thereof.

[1368] A RNAi agent comprising a first and a second strand, wherein the sequence of the first strand is the sequence of a first strand of: AD-38146.1 (SEQ ID NO: 540), or a modified or unmodified variant thereof.

[1369] A RNAi agent comprising a first and a second strand, wherein the sequence of the first strand is the sequence of a first strand of: AD-38152.1 (SEQ ID NO: 541), or a modified or unmodified variant thereof.

[1370] A RNAi agent comprising a first and a second strand, wherein the sequence of the first strand is the sequence of a first strand of: AD-38158.1 (SEQ ID NO: 542), or a modified or unmodified variant thereof.

[1371] A RNAi agent comprising a first and a second strand, wherein the sequence of the first strand is the sequence of a first strand of: AD-38164.1 (SEQ ID NO: 543), or a modified or unmodified variant thereof.

[1372] A RNAi agent comprising a first and a second strand, wherein the sequence of the first strand is the sequence of a first strand of: AD-38170.1 (SEQ ID NO: 544), or a modified or unmodified variant thereof.

[1373] A RNAi agent comprising a first and a second strand, wherein the sequence of the first strand is the sequence of a first strand of: AD-38129.1 (SEQ ID NO: 545), or a modified or unmodified variant thereof.

[1374] A RNAi agent comprising a first and a second strand, wherein the sequence of the first strand is the sequence of a first strand of: AD-38135.1 (SEQ ID NO: 546), or a modified or unmodified variant thereof.

[1375] A RNAi agent comprising a first and a second strand, wherein the sequence of the first strand is the sequence of a first strand of: AD-38141.1 (SEQ ID NO: 547), or a modified or unmodified variant thereof.

[1376] A RNAi agent comprising a first and a second strand, wherein the sequence of the first strand is the sequence of a first strand of: AD-38147.1 (SEQ ID NO: 548), or a modified or unmodified variant thereof.

[1377] A RNAi agent comprising a first and a second strand, wherein the sequence of the first strand is the sequence of a first strand of: AD-38153.1 (SEQ ID NO: 549), or a modified or unmodified variant thereof.

[1378] A RNAi agent comprising a first and a second strand, wherein the sequence of the first strand is the sequence of a first strand of: AD-38159.1 (SEQ ID NO: 550), or a modified or unmodified variant

[1379] A RNAi agent comprising a first and a second strand, wherein the sequence of the first strand is the sequence of a first strand of: AD-38165.1 (SEQ ID NO: 551), or a modified or unmodified variant thereof.

[1380] A RNAi agent comprising a first and a second strand, wherein the sequence of the first strand is the sequence of a first strand of: AD-38171.1 (SEQ ID NO: 552), or a modified or unmodified variant thereof.

[1381] A RNAi agent comprising a first and a second strand, wherein the sequence of the first strand is the sequence of a first strand of: AD-38130.1 (SEQ ID NO: 553), or a modified or unmodified variant thereof.

[1382] A RNAi agent comprising a first and a second strand, wherein the sequence of the first strand is the sequence of a first strand of: AD-38136.1 (SEQ ID NO: 554), or a modified or unmodified variant thereof.

[1383] A RNAi agent comprising a first and a second strand, wherein the sequence of the first strand is the sequence of a first strand of: AD-38142.1 (SEQ ID NO: 555), or a modified or unmodified variant thereof.

[1384] A RNAi agent comprising a first and a second strand, wherein the sequence of the first strand is the sequence of a first strand of: AD-38148.1 (SEQ ID NO: 556), or a modified or unmodified variant thereof.

[1385] A RNAi agent comprising a first and a second strand, wherein the sequence of the first strand is the sequence of a first strand of: AD-38154.1 (SEQ ID NO: 557), or a modified or unmodified variant thereof.

[1386] A RNAi agent comprising a first and a second strand, wherein the sequence of the first strand is the sequence of a first strand of: AD-38160.1 (SEQ ID NO: 558), or a modified or unmodified variant thereof.

[1387] A RNAi agent comprising a first and a second strand, wherein the sequence of the first strand is the sequence of a first strand of: AD-38166.1 (SEQ ID NO: 559), or a modified or unmodified variant thereof.

[1388] A RNAi agent comprising a first and a second strand, wherein the sequence of the first strand is the sequence of a first strand of: AD-38172.1 (SEQ ID NO: 560), or a modified or unmodified variant thereof.

[1389] A RNAi agent comprising a first and a second strand, wherein the sequence of the first strand is the sequence of a first strand of: AD-38131.1 (SEQ ID NO: 561), or a modified or unmodified variant thereof.

[1390] A RNAi agent comprising a first and a second strand, wherein the sequence of the first strand is the sequence of a first strand of: AD-38137.1 (SEQ ID NO: 562), or a modified or unmodified variant thereof.

[1391] A RNAi agent comprising a first and a second strand, wherein the sequence of the first strand is the sequence of a first strand of: AD-38143.1 (SEQ ID NO: 563), or a modified or unmodified variant thereof.

[1392] A RNAi agent comprising a first and a second strand, wherein the sequence of the first strand is the sequence of a first strand of: AD-38149.1 (SEQ ID NO: 564), or a modified or unmodified variant thereof.

[1393] A RNAi agent comprising a first and a second strand, wherein the sequence of the first strand is the sequence of a first strand of: AD-38155.1 (SEQ ID NO: 565), or a modified or unmodified variant thereof.

[1394] A RNAi agent comprising a first and a second strand, wherein the sequence of the first strand is the sequence of a first strand of: AD-38161.1 (SEQ ID NO: 566), or a modified or unmodified variant thereof.

[1395] A RNAi agent comprising a first and a second strand, wherein the sequence of the first strand is the sequence of a first strand of: AD-38167.1 (SEQ ID NO: 567), or a modified or unmodified variant thereof.

[1396] A RNAi agent comprising a first and a second strand, wherein the sequence of the first strand is the sequence of a first strand of: AD-38173.1 (SEQ ID NO: 568), or a modified or unmodified variant thereof.

[1397] A RNAi agent comprising a first and a second strand, wherein the sequence of the first strand is the sequence of a first strand of: AD-38132.1 (SEQ ID NO: 569), or a modified or unmodified variant thereof.

[1398] A RNAi agent comprising a first and a second strand, wherein the sequence of the first strand is the sequence of a first strand of: AD-38138.1 (SEQ ID NO: 570), or a modified or unmodified variant thereof.

[1399] A RNAi agent comprising a first and a second strand, wherein the sequence of the first strand is the sequence of a first strand of: AD-38144.1 (SEQ ID NO: 571), or a modified or unmodified variant thereof.

[1400] A RNAi agent comprising a first and a second strand, wherein the sequence of the first strand is the sequence of a first strand of: AD-38150.1 (SEQ ID NO: 572), or a modified or unmodified variant thereof.

[1401] A RNAi agent comprising a first and a second strand, wherein the sequence of the first strand is the sequence of a first strand of: AD-38156.1 (SEQ ID NO: 573), or a modified or unmodified variant thereof.

[1402] A RNAi agent comprising a first and a second strand, wherein the sequence of the first strand is the sequence of a first strand of: AD-38162.1 (SEQ ID NO: 574), or a modified or unmodified variant thereof.

[1403] A RNAi agent comprising a first and a second strand, wherein the sequence of the first strand is the sequence of a first strand of: AD-38168.1 (SEQ ID NO: 575), or a modified or unmodified variant thereof.

[1404] A RNAi agent comprising a first and a second strand, wherein the sequence of the first strand is the sequence of a first strand of: AD-38174.1 (SEQ ID NO: 576), or a modified or unmodified variant thereof.

[1405] A RNAi agent comprising a first and a second strand, wherein the sequence of the first strand is the sequence of a first strand of: AD-39683.1 (SEQ ID NO: 577), or a modified or unmodified variant thereof.

[1406] A RNAi agent comprising a first and a second strand, wherein the sequence of the first strand is the sequence of a first strand of: AD-39689.1 (SEQ ID NO: 578), or a modified or unmodified variant thereof.

[1407] A RNAi agent comprising a first and a second strand, wherein the sequence of the first strand is the sequence of a first strand of: AD-39695.1 (SEQ ID NO: 579), or a modified or unmodified variant thereof.

[1408] A RNAi agent comprising a first and a second strand, wherein the sequence of the first strand is the sequence of a first strand of: AD-39701.1 (SEQ ID NO: 580), or a modified or unmodified variant thereof.

[1409] A RNAi agent comprising a first and a second strand, wherein the sequence of the first strand is the sequence of a first strand of: AD-39707.1 (SEQ ID NO: 581), or a modified or unmodified variant thereof.

[1410] A RNAi agent comprising a first and a second strand, wherein the sequence of the first strand is the sequence of a first strand of: AD-39713.1 (SEQ ID NO: 582), or a modified or unmodified variant thereof.

[1411] A RNAi agent comprising a first and a second strand, wherein the sequence of the first strand is the sequence of a first strand of: AD-39719.1 (SEQ ID NO: 583), or a modified or unmodified variant thereof.

[1412] A RNAi agent comprising a first and a second strand, wherein the sequence of the first strand is the sequence of a first strand of: AD-39725.1 (SEQ ID NO: 584), or a modified or unmodified variant thereof.

[1413] A RNAi agent comprising a first and a second strand, wherein the sequence of the first strand is the sequence of a first strand of: AD-39684.1 (SEQ ID NO: 585), or a modified or unmodified variant thereof.

[1414] A RNAi agent comprising a first and a second strand, wherein the sequence of the first strand is the sequence of a first strand of: AD-39690.1 (SEQ ID NO: 586), or a modified or unmodified variant thereof.

[1415] A RNAi agent comprising a first and a second strand, wherein the sequence of the first strand is the sequence of a first strand of: AD-39696.1 (SEQ ID NO: 587), or a modified or unmodified variant thereof.

[1416] A RNAi agent comprising a first and a second strand, wherein the sequence of the first strand is the sequence of a first strand of: AD-39702.1 (SEQ ID NO: 588), or a modified or unmodified variant thereof.

[1417] A RNAi agent comprising a first and a second strand, wherein the sequence of the first strand is the sequence of a first strand of: AD-39708.1 (SEQ ID NO: 589), or a modified or unmodified variant thereof.

[1418] A RNAi agent comprising a first and a second strand, wherein the sequence of the first strand is the sequence of a first strand of: AD-39714.1 (SEQ ID NO: 590), or a modified or unmodified variant

[1419] A RNAi agent comprising a first and a second strand, wherein the sequence of the first strand is the sequence of a first strand of: AD-39720.1 (SEQ ID NO: 591), or a modified or unmodified variant thereof.

[1420] A RNAi agent comprising a first and a second strand, wherein the sequence of the first strand is the sequence of a first strand of: AD-39726.1 (SEQ ID NO: 592), or a modified or unmodified variant thereof.

[1421] A RNAi agent comprising a first and a second strand, wherein the sequence of the first strand is the sequence of a first strand of: AD-39685.1 (SEQ ID NO: 593), or a modified or unmodified variant thereof.

[1422] A RNAi agent comprising a first and a second strand, wherein the sequence of the first strand is the sequence of a first strand of: AD-39691.1 (SEQ ID NO: 594), or a modified or unmodified variant thereof.

[1423] A RNAi agent comprising a first and a second strand, wherein the sequence of the first strand is the sequence of a first strand of: AD-39697.1 (SEQ ID NO: 595), or a modified or unmodified variant thereof.

[1424] A RNAi agent comprising a first and a second strand, wherein the sequence of the first strand is the sequence of a first strand of: AD-39703.1 (SEQ ID NO: 596), or a modified or unmodified variant thereof.

[1425] A RNAi agent comprising a first and a second strand, wherein the sequence of the first strand is the sequence of a first strand of: AD-39709.1 (SEQ ID NO: 597), or a modified or unmodified variant thereof.

[1426] A RNAi agent comprising a first and a second strand, wherein the sequence of the first strand is the sequence of a first strand of: AD-39715.1 (SEQ ID NO: 598), or a modified or unmodified variant thereof.

[1427] A RNAi agent comprising a first and a second strand, wherein the sequence of the first strand is the sequence of a first strand of: AD-39721.1 (SEQ ID NO: 599), or a modified or unmodified variant thereof.

[1428] A RNAi agent comprising a first and a second strand, wherein the sequence of the first strand is the sequence of a first strand of: AD-39727.1 (SEQ ID NO: 600), or a modified or unmodified variant thereof.

[1429] A RNAi agent comprising a first and a second strand, wherein the sequence of the first strand is the sequence of a first strand of: AD-39686.1 (SEQ ID NO: 601), or a modified or unmodified variant thereof.

[1430] A RNAi agent comprising a first and a second strand, wherein the sequence of the first strand is the sequence of a first strand of: AD-39692.1 (SEQ ID NO: 602), or a modified or unmodified variant thereof.

[1431] A RNAi agent comprising a first and a second strand, wherein the sequence of the first strand is the sequence of a first strand of: AD-39698.1 (SEQ ID NO: 603), or a modified or unmodified variant thereof.

[1432] A RNAi agent comprising a first and a second strand, wherein the sequence of the first strand is the sequence of a first strand of: AD-39704.1 (SEQ ID NO: 604), or a modified or unmodified variant thereof.

[1433] A RNAi agent comprising a first and a second strand, wherein the sequence of the first strand is the sequence of a first strand of: AD-39710.1 (SEQ ID NO: 605), or a modified or unmodified variant thereof.

[1434] A RNAi agent comprising a first and a second strand, wherein the sequence of the first strand is the sequence of a first strand of: AD-39716.1 (SEQ ID NO: 606), or a modified or unmodified variant thereof.

[1435] A RNAi agent comprising a first and a second strand, wherein the sequence of the first strand is the sequence of a first strand of: AD-39722.1 (SEQ ID NO: 607), or a modified or unmodified variant thereof.

[1436] A RNAi agent comprising a first and a second strand, wherein the sequence of the first strand is the sequence of a first strand of: AD-39728.1 (SEQ ID NO: 608), or a modified or unmodified variant thereof.

[1437] A RNAi agent comprising a first and a second strand, wherein the sequence of the first strand is the sequence of a first strand of: AD-39687.1 (SEQ ID NO: 609), or a modified or unmodified variant thereof.

[1438] A RNAi agent comprising a first and a second strand, wherein the sequence of the first strand is the sequence of a first strand of: AD-39693.1 (SEQ ID NO: 610), or a modified or unmodified variant thereof.

[1439] A RNAi agent comprising a first and a second strand, wherein the sequence of the first strand is the sequence of a first strand of: AD-39699.1 (SEQ ID NO: 611), or a modified or unmodified variant thereof.

[1440] A RNAi agent comprising a first and a second strand, wherein the sequence of the first strand is the sequence of a first strand of: AD-39705.1 (SEQ ID NO: 612), or a modified or unmodified variant thereof.

[1441] A RNAi agent comprising a first and a second strand, wherein the sequence of the first strand is the sequence of a first strand of: AD-39711.1 (SEQ ID NO: 613), or a modified or unmodified variant thereof.

[1442] A RNAi agent comprising a first and a second strand, wherein the sequence of the first strand is the sequence of a first strand of: AD-39717.1 (SEQ ID NO: 614), or a modified or unmodified variant thereof.

[1443] A RNAi agent comprising a first and a second strand, wherein the sequence of the first strand is the sequence of a first strand of: AD-39723.1 (SEQ ID NO: 615), or a modified or unmodified variant thereof.

[1444] A RNAi agent comprising a first and a second strand, wherein the sequence of the first strand is the sequence of a first strand of: AD-39729.1 (SEQ ID NO: 616), or a modified or unmodified variant thereof.

[1445] A RNAi agent comprising a first and a second strand, wherein the sequence of the first strand is the sequence of a first strand of: AD-39688.1 (SEQ ID NO: 617), or a modified or unmodified variant thereof.

[1446] A RNAi agent comprising a first and a second strand, wherein the sequence of the first strand is the sequence of a first strand of: AD-39694.1 (SEQ ID NO: 618), or a modified or unmodified variant thereof.

[1447] A RNAi agent comprising a first and a second strand, wherein the sequence of the first strand is the sequence of a first strand of: AD-39700.1 (SEQ ID NO: 619), or a modified or unmodified variant thereof.

[1448] A RNAi agent comprising a first and a second strand, wherein the sequence of the first strand is the sequence of a first strand of: AD-39706.1 (SEQ ID NO: 620), or a modified or unmodified variant thereof.

[1449] A RNAi agent comprising a first and a second strand, wherein the sequence of the first strand is the sequence of a first strand of: AD-39712.1 (SEQ ID NO: 621), or a modified or unmodified variant thereof.

[1450] A RNAi agent comprising a first and a second strand, wherein the sequence of the first strand is the sequence of a first strand of: AD-39718.1 (SEQ ID NO: 622), or a modified or unmodified variant thereof.

[1451] A RNAi agent comprising a first and a second strand, wherein the sequence of the first strand is the sequence of a first strand of: AD-39724.1 (SEQ ID NO: 623), or a modified or unmodified variant thereof.

[1452] A RNAi agent comprising a first and a second strand, wherein the sequence of the first strand is the sequence of a first strand of: AD-39730.1 (SEQ ID NO: 624), or a modified or unmodified variant thereof.

[1453] A RNAi agent comprising a first and a second strand, wherein the sequence of the first strand is the sequence of a first strand of: AD-39736.1 (SEQ ID NO: 625), or a modified or unmodified variant thereof.

[1454] A RNAi agent comprising a first and a second strand, wherein the sequence of the first strand is the sequence of a first strand of: AD-39742.1 (SEQ ID NO: 626), or a modified or unmodified variant thereof.

[1455] A RNAi agent comprising a first and a second strand, wherein the sequence of the first strand is the sequence of a first strand of: AD-39748.1 (SEQ ID NO: 627), or a modified or unmodified variant thereof.

[1456] A RNAi agent comprising a first and a second strand, wherein the sequence of the first strand is the sequence of a first strand of: AD-39754.1 (SEQ ID NO: 628), or a modified or unmodified variant thereof.

[1457] A RNAi agent comprising a first and a second strand, wherein the sequence of the first strand is the sequence of a first strand of: AD-39760.1 (SEQ ID NO: 629), or a modified or unmodified variant thereof.

[1458] A RNAi agent comprising a first and a second strand, wherein the sequence of the first strand is the sequence of a first strand of: AD-39766.1 (SEQ ID NO: 630), or a modified or unmodified variant

[1459] A RNAi agent comprising a first and a second strand, wherein the sequence of the first strand is the sequence of a first strand of: AD-39772.1 (SEQ ID NO: 631), or a modified or unmodified variant thereof.

[1460] A RNAi agent comprising a first and a second strand, wherein the sequence of the first strand is the sequence of a first strand of: AD-39731.1 (SEQ ID NO: 632), or a modified or unmodified variant thereof.

[1461] A RNAi agent comprising a first and a second strand, wherein the sequence of the first strand is the sequence of a first strand of: AD-39737.1 (SEQ ID NO: 633), or a modified or unmodified variant thereof.

[1462] A RNAi agent comprising a first and a second strand, wherein the sequence of the first strand is the sequence of a first strand of: AD-39743.1 (SEQ ID NO: 634), or a modified or unmodified variant thereof.

[1463] A RNAi agent comprising a first and a second strand, wherein the sequence of the first strand is the sequence of a first strand of: AD-39749.1 (SEQ ID NO: 635), or a modified or unmodified variant thereof.

[1464] A RNAi agent comprising a first and a second strand, wherein the sequence of the first strand is the sequence of a first strand of: AD-39755.1 (SEQ ID NO: 636), or a modified or unmodified variant thereof.

[1465] A RNAi agent comprising a first and a second strand, wherein the sequence of the first strand is the sequence of a first strand of: AD-39761.1 (SEQ ID NO: 637), or a modified or unmodified variant thereof.

[1466] A RNAi agent comprising a first and a second strand, wherein the sequence of the first strand is the sequence of a first strand of: AD-39767.1 (SEQ ID NO: 638), or a modified or unmodified variant thereof.

[1467] A RNAi agent comprising a first and a second strand, wherein the sequence of the first strand is the sequence of a first strand of: AD-39773.1 (SEQ ID NO: 639), or a modified or unmodified variant thereof.

[1468] A RNAi agent comprising a first and a second strand, wherein the sequence of the first strand is the sequence of a first strand of: AD-39732.1 (SEQ ID NO: 640), or a modified or unmodified variant thereof.

[1469] A RNAi agent comprising a first and a second strand, wherein the sequence of the first strand is the sequence of a first strand of: AD-39738.1 (SEQ ID NO: 641), or a modified or unmodified variant thereof.

[1470] A RNAi agent comprising a first and a second strand, wherein the sequence of the first strand is the sequence of a first strand of: AD-39744.1 (SEQ ID NO: 642), or a modified or unmodified variant thereof.

[1471] A RNAi agent comprising a first and a second strand, wherein the sequence of the first strand is the sequence of a first strand of: AD-39750.1 (SEQ ID NO: 643), or a modified or unmodified variant thereof.

[1472] A RNAi agent comprising a first and a second strand, wherein the sequence of the first strand is the sequence of a first strand of: AD-39756.1 (SEQ ID NO: 644), or a modified or unmodified variant thereof.

[1473] A RNAi agent comprising a first and a second strand, wherein the sequence of the first strand is the sequence of a first strand of: AD-39762.1 (SEQ ID NO: 645), or a modified or unmodified variant thereof.

[1474] A RNAi agent comprising a first and a second strand, wherein the sequence of the first strand is the sequence of a first strand of: AD-39768.1 (SEQ ID NO: 646), or a modified or unmodified variant thereof.

[1475] A RNAi agent comprising a first and a second strand, wherein the sequence of the first strand is the sequence of a first strand of: AD-39774.1 (SEQ ID NO: 647), or a modified or unmodified variant thereof.

[1476] A RNAi agent comprising a first and a second strand, wherein the sequence of the first strand is the sequence of a first strand of: AD-39733.1 (SEQ ID NO: 648), or a modified or unmodified variant thereof.

[1477] A RNAi agent comprising a first and a second strand, wherein the sequence of the first strand is the sequence of a first strand of: AD-39739.1 (SEQ ID NO: 649), or a modified or unmodified variant thereof.

[1478] A RNAi agent comprising a first and a second strand, wherein the sequence of the first strand is the sequence of a first strand of: AD-39745.1 (SEQ ID NO: 650), or a modified or unmodified variant thereof.

[1479] A RNAi agent comprising a first and a second strand, wherein the sequence of the first strand is the sequence of a first strand of: AD-39751.1 (SEQ ID NO: 651), or a modified or unmodified variant thereof.

[1480] A RNAi agent comprising a first and a second strand, wherein the sequence of the first strand is the sequence of a first strand of: AD-39757.1 (SEQ ID NO: 652), or a modified or unmodified variant thereof.

[1481] A RNAi agent comprising a first and a second strand, wherein the sequence of the first strand is the sequence of a first strand of: AD-39763.1 (SEQ ID NO: 653), or a modified or unmodified variant thereof.

[1482] A RNAi agent comprising a first and a second strand, wherein the sequence of the first strand is the sequence of a first strand of: AD-39769.1 (SEQ ID NO: 654), or a modified or unmodified variant thereof.

[1483] A RNAi agent comprising a first and a second strand, wherein the sequence of the first strand is the sequence of a first strand of: AD-39775.1 (SEQ ID NO: 655), or a modified or unmodified variant thereof.

[1484] A RNAi agent comprising a first and a second strand, wherein the sequence of the first strand is the sequence of a first strand of: AD-39734.1 (SEQ ID NO: 656), or a modified or unmodified variant thereof.

[1485] A RNAi agent comprising a first and a second strand, wherein the sequence of the first strand is the sequence of a first strand of: AD-39740.1 (SEQ ID NO: 657), or a modified or unmodified variant thereof.

[1486] A RNAi agent comprising a first and a second strand, wherein the sequence of the first strand is the sequence of a first strand of: AD-39746.1 (SEQ ID NO: 658), or a modified or unmodified variant thereof.

[1487] A RNAi agent comprising a first and a second strand, wherein the sequence of the first strand is the sequence of a first strand of: AD-39752.1 (SEQ ID NO: 659), or a modified or unmodified variant thereof.

[1488] A RNAi agent comprising a first and a second strand, wherein the sequence of the first strand is the sequence of a first strand of: AD-39758.1 (SEQ ID NO: 660), or a modified or unmodified variant thereof.

[1489] A RNAi agent comprising a first and a second strand, wherein the sequence of the first strand is the sequence of a first strand of: AD-39764.1 (SEQ ID NO: 661), or a modified or unmodified variant thereof.

[1490] A RNAi agent comprising a first and a second strand, wherein the sequence of the first strand is the sequence of a first strand of: AD-39770.1 (SEQ ID NO: 662), or a modified or unmodified variant thereof.

[1491] A RNAi agent comprising a first and a second strand, wherein the sequence of the first strand is the sequence of a first strand of: AD-39776.1 (SEQ ID NO: 663), or a modified or unmodified variant thereof.

[1492] A RNAi agent comprising a first and a second strand, wherein the sequence of the first strand is the sequence of a first strand of: AD-39735.1 (SEQ ID NO: 664), or a modified or unmodified variant thereof.

[1493] A RNAi agent comprising a first and a second strand, wherein the sequence of the first strand is the sequence of a first strand of: AD-39741.1 (SEQ ID NO: 665), or a modified or unmodified variant thereof.

[1494] A RNAi agent comprising a first and a second strand, wherein the sequence of the first strand is the sequence of a first strand of: AD-39747.1 (SEQ ID NO: 666), or a modified or unmodified variant thereof.

[1495] A RNAi agent comprising a first and a second strand, wherein the sequence of the first strand is the sequence of a first strand of: AD-39753.1 (SEQ ID NO: 667), or a modified or unmodified variant thereof.

[1496] A RNAi agent comprising a first and a second strand, wherein the sequence of the first strand is the sequence of a first strand of: AD-39759.1 (SEQ ID NO: 668), or a modified or unmodified variant thereof.

[1497] A RNAi agent comprising a first and a second strand, wherein the sequence of the first strand is the sequence of a first strand of: AD-39765.1 (SEQ ID NO: 669), or a modified or unmodified variant thereof.

[1498] A RNAi agent comprising a first and a second strand, wherein the sequence of the first strand is the sequence of a first strand of: AD-39771.1 (SEQ ID NO: 670), or a modified or unmodified variant

[1499] A RNAi agent comprising a first and a second strand, wherein the sequence of the first strand is the sequence of a first strand of: AD-39778.1 (SEQ ID NO: 671), or a modified or unmodified variant thereof.

[1500] A RNAi agent comprising a first and a second strand, wherein the sequence of the first strand is the sequence of a first strand of: AD-39784.1 (SEQ ID NO: 672), or a modified or unmodified variant thereof.

[1501] A RNAi agent comprising a first and a second strand, wherein the sequence of the first strand is the sequence of a first strand of: AD-39790.1 (SEQ ID NO: 673), or a modified or unmodified variant thereof.

[1502] A RNAi agent comprising a first and a second strand, wherein the sequence of the first strand is the sequence of a first strand of: AD-39796.1 (SEQ ID NO: 674), or a modified or unmodified variant thereof.

[1503] A RNAi agent comprising a first and a second strand, wherein the sequence of the first strand is the sequence of a first strand of: AD-39802.1 (SEQ ID NO: 675), or a modified or unmodified variant thereof.

[1504] A RNAi agent comprising a first and a second strand, wherein the sequence of the first strand is the sequence of a first strand of: AD-39808.1 (SEQ ID NO: 676), or a modified or unmodified variant thereof.

[1505] A RNAi agent comprising a first and a second strand, wherein the sequence of the first strand is the sequence of a first strand of: AD-39814.1 (SEQ ID NO: 677), or a modified or unmodified variant thereof.

[1506] A RNAi agent comprising a first and a second strand, wherein the sequence of the first strand is the sequence of a first strand of: AD-39820.1 (SEQ ID NO: 678), or a modified or unmodified variant thereof.

[1507] A RNAi agent comprising a first and a second strand, wherein the sequence of the first strand is the sequence of a first strand of: AD-39779.1 (SEQ ID NO: 679), or a modified or unmodified variant thereof.

[1508] A RNAi agent comprising a first and a second strand, wherein the sequence of the first strand is the sequence of a first strand of: AD-39785.1 (SEQ ID NO: 680), or a modified or unmodified variant thereof.

[1509] A RNAi agent comprising a first and a second strand, wherein the sequence of the first strand is the sequence of a first strand of: AD-39791.1 (SEQ ID NO: 681), or a modified or unmodified variant thereof.

[1510] A RNAi agent comprising a first and a second strand, wherein the sequence of the first strand is the sequence of a first strand of: AD-39797.1 (SEQ ID NO: 682), or a modified or unmodified variant thereof.

[1511] A RNAi agent comprising a first and a second strand, wherein the sequence of the first strand is the sequence of a first strand of: AD-39803.1 (SEQ ID NO: 683), or a modified or unmodified variant thereof.

[1512] A RNAi agent comprising a first and a second strand, wherein the sequence of the first strand is the sequence of a first strand of: AD-39809.1 (SEQ ID NO: 684), or a modified or unmodified variant thereof.

[1513] A RNAi agent comprising a first and a second strand, wherein the sequence of the first strand is the sequence of a first strand of: AD-39815.1 (SEQ ID NO: 685), or a modified or unmodified variant thereof.

[1514] A RNAi agent comprising a first and a second strand, wherein the sequence of the first strand is the sequence of a first strand of: AD-39821.1 (SEQ ID NO: 686), or a modified or unmodified variant thereof.

[1515] A RNAi agent comprising a first and a second strand, wherein the sequence of the first strand is the sequence of a first strand of: AD-39780.1 (SEQ ID NO: 687), or a modified or unmodified variant thereof.

[1516] A RNAi agent comprising a first and a second strand, wherein the sequence of the first strand is the sequence of a first strand of: AD-39786.1 (SEQ ID NO: 688), or a modified or unmodified variant thereof.

[1517] A RNAi agent comprising a first and a second strand, wherein the sequence of the first strand is the sequence of a first strand of: AD-39792.1 (SEQ ID NO: 689), or a modified or unmodified variant thereof.

[1518] A RNAi agent comprising a first and a second strand, wherein the sequence of the first strand is the sequence of a first strand of: AD-39798.1 (SEQ ID NO: 690), or a modified or unmodified variant thereof.

[1519] A RNAi agent comprising a first and a second strand, wherein the sequence of the first strand is the sequence of a first strand of: AD-39804.1 (SEQ ID NO: 691), or a modified or unmodified variant thereof.

[1520] A RNAi agent comprising a first and a second strand, wherein the sequence of the first strand is the sequence of a first strand of: AD-39810.1 (SEQ ID NO: 692), or a modified or unmodified variant thereof.

[1521] A RNAi agent comprising a first and a second strand, wherein the sequence of the first strand is the sequence of a first strand of: AD-39816.1 (SEQ ID NO: 693), or a modified or unmodified variant thereof.

[1522] A RNAi agent comprising a first and a second strand, wherein the sequence of the first strand is the sequence of a first strand of: AD-39822.1 (SEQ ID NO: 694), or a modified or unmodified variant thereof.

[1523] A RNAi agent comprising a first and a second strand, wherein the sequence of the first strand is the sequence of a first strand of: AD-39781.1 (SEQ ID NO: 695), or a modified or unmodified variant thereof.

[1524] A RNAi agent comprising a first and a second strand, wherein the sequence of the first strand is the sequence of a first strand of: AD-39787.1 (SEQ ID NO: 696), or a modified or unmodified variant thereof.

[1525] A RNAi agent comprising a first and a second strand, wherein the sequence of the first strand is the sequence of a first strand of: AD-39793.1 (SEQ ID NO: 697), or a modified or unmodified variant thereof.

[1526] A RNAi agent comprising a first and a second strand, wherein the sequence of the first strand is the sequence of a first strand of: AD-39799.1 (SEQ ID NO: 698), or a modified or unmodified variant thereof.

[1527] A RNAi agent comprising a first and a second strand, wherein the sequence of the first strand is the sequence of a first strand of: AD-39805.1 (SEQ ID NO: 699), or a modified or unmodified variant thereof.

[1528] A RNAi agent comprising a first and a second strand, wherein the sequence of the first strand is the sequence of a first strand of: AD-39811.1 (SEQ ID NO: 700), or a modified or unmodified variant thereof.

[1529] A RNAi agent comprising a first and a second strand, wherein the sequence of the first strand is the sequence of a first strand of: AD-39817.1 (SEQ ID NO: 701), or a modified or unmodified variant thereof.

[1530] A RNAi agent comprising a first and a second strand, wherein the sequence of the first strand is the sequence of a first strand of: AD-39823.1 (SEQ ID NO: 702), or a modified or unmodified variant thereof.

[1531] A RNAi agent comprising a first and a second strand, wherein the sequence of the first strand is the sequence of a first strand of: AD-39782.1 (SEQ ID NO: 703), or a modified or unmodified variant thereof.

[1532] A RNAi agent comprising a first and a second strand, wherein the sequence of the first strand is the sequence of a first strand of: AD-39788.1 (SEQ ID NO: 704), or a modified or unmodified variant thereof.

[1533] A RNAi agent comprising a first and a second strand, wherein the sequence of the first strand is the sequence of a first strand of: AD-39794.1 (SEQ ID NO: 705), or a modified or unmodified variant thereof.

[1534] A RNAi agent comprising a first and a second strand, wherein the sequence of the first strand is the sequence of a first strand of: AD-39800.1 (SEQ ID NO: 706), or a modified or unmodified variant thereof.

[1535] A RNAi agent comprising a first and a second strand, wherein the sequence of the first strand is the sequence of a first strand of: AD-39806.1 (SEQ ID NO: 707), or a modified or unmodified variant thereof.

[1536] A RNAi agent comprising a first and a second strand, wherein the sequence of the first strand is the sequence of a first strand of: AD-39812.1 (SEQ ID NO: 708), or a modified or unmodified variant thereof.

[1537] A RNAi agent comprising a first and a second strand, wherein the sequence of the first strand is the sequence of a first strand of: AD-39818.1 (SEQ ID NO: 709), or a modified or unmodified variant thereof.

[1538] A RNAi agent comprising a first and a second strand, wherein the sequence of the first strand is the sequence of a first strand of: AD-39824.1 (SEQ ID NO: 710), or a modified or unmodified variant

[1539] A RNAi agent comprising a first and a second strand, wherein the sequence of the first strand is the sequence of a first strand of: AD-39783.1 (SEQ ID NO: 711), or a modified or unmodified variant thereof.

[1540] A RNAi agent comprising a first and a second strand, wherein the sequence of the first strand is the sequence of a first strand of: AD-39789.1 (SEQ ID NO: 712), or a modified or unmodified variant thereof.

[1541] A RNAi agent comprising a first and a second strand, wherein the sequence of the first strand is the sequence of a first strand of: AD-39795.1 (SEQ ID NO: 713), or a modified or unmodified variant thereof.

[1542] A RNAi agent comprising a first and a second strand, wherein the sequence of the first strand is the sequence of a first strand of: AD-39801.1 (SEQ ID NO: 714), or a modified or unmodified variant thereof.

[1543] A RNAi agent comprising a first and a second strand, wherein the sequence of the first strand is the sequence of a first strand of: AD-39807.1 (SEQ ID NO: 715), or a modified or unmodified variant thereof.

[1544] A RNAi agent comprising a first and a second strand, wherein the sequence of the first strand is the sequence of a first strand of: AD-39813.1 (SEQ ID NO: 716), or a modified or unmodified variant thereof.

[1545] A RNAi agent comprising a first and a second strand, wherein the sequence of the first strand is the sequence of a first strand of: AD-39819.1 (SEQ ID NO: 717), or a modified or unmodified variant thereof.

[1546] A RNAi agent comprising a first and a second strand, wherein the sequence of the first strand is the sequence of a first strand of: AD-39825.1 (SEQ ID NO: 718), or a modified or unmodified variant thereof.

[1547] A RNAi agent comprising a first and a second strand, wherein the sequence of the first strand is the sequence of a first strand of: AD-39831.1 (SEQ ID NO: 719), or a modified or unmodified variant thereof.

[1548] A RNAi agent comprising a first and a second strand, wherein the sequence of the first strand is the sequence of a first strand of: AD-39837.1 (SEQ ID NO: 720), or a modified or unmodified variant thereof.

[1549] A RNAi agent comprising a first and a second strand, wherein the sequence of the first strand is the sequence of a first strand of: AD-39843.1 (SEQ ID NO: 721), or a modified or unmodified variant thereof.

[1550] A RNAi agent comprising a first and a second strand, wherein the sequence of the first strand is the sequence of a first strand of: AD-39849.1 (SEQ ID NO: 722), or a modified or unmodified variant thereof.

[1551] A RNAi agent comprising a first and a second strand, wherein the sequence of the first strand is the sequence of a first strand of: AD-39855.1 (SEQ ID NO: 723), or a modified or unmodified variant thereof.

[1552] A RNAi agent comprising a first and a second strand, wherein the sequence of the first strand is the sequence of a first strand of: AD-39861.1 (SEQ ID NO: 724), or a modified or unmodified variant thereof.

[1553] A RNAi agent comprising a first and a second strand, wherein the sequence of the first strand is the sequence of a first strand of: AD-39867.1 (SEQ ID NO: 725), or a modified or unmodified variant thereof.

[1554] A RNAi agent comprising a first and a second strand, wherein the sequence of the first strand is the sequence of a first strand of: AD-39826.1 (SEQ ID NO: 726), or a modified or unmodified variant thereof.

[1555] A RNAi agent comprising a first and a second strand, wherein the sequence of the first strand is the sequence of a first strand of: AD-39832.1 (SEQ ID NO: 727), or a modified or unmodified variant thereof.

[1556] A RNAi agent comprising a first and a second strand, wherein the sequence of the first strand is the sequence of a first strand of: AD-39838.1 (SEQ ID NO: 728), or a modified or unmodified variant thereof.

[1557] A RNAi agent comprising a first and a second strand, wherein the sequence of the first strand is the sequence of a first strand of: AD-39844.1 (SEQ ID NO: 729), or a modified or unmodified variant thereof.

[1558] A RNAi agent comprising a first and a second strand, wherein the sequence of the first strand is the sequence of a first strand of: AD-39850.1 (SEQ ID NO: 730), or a modified or unmodified variant thereof.

[1559] A RNAi agent comprising a first and a second strand, wherein the sequence of the first strand is the sequence of a first strand of: AD-39856.1 (SEQ ID NO: 731), or a modified or unmodified variant thereof.

[1560] A RNAi agent comprising a first and a second strand, wherein the sequence of the first strand is the sequence of a first strand of: AD-39862.1 (SEQ ID NO: 732), or a modified or unmodified variant thereof.

[1561] A RNAi agent comprising a first and a second strand, wherein the sequence of the first strand is the sequence of a first strand of: AD-39868.1 (SEQ ID NO: 733), or a modified or unmodified variant thereof.

[1562] A RNAi agent comprising a first and a second strand, wherein the sequence of the first strand is the sequence of a first strand of: AD-39827.1 (SEQ ID NO: 734), or a modified or unmodified variant thereof.

[1563] A RNAi agent comprising a first and a second strand, wherein the sequence of the first strand is the sequence of a first strand of: AD-39833.1 (SEQ ID NO: 735), or a modified or unmodified variant thereof.

[1564] A RNAi agent comprising a first and a second strand, wherein the sequence of the first strand is the sequence of a first strand of: AD-39839.1 (SEQ ID NO: 736), or a modified or unmodified variant thereof.

[1565] A RNAi agent comprising a first and a second strand, wherein the sequence of the first strand is the sequence of a first strand of: AD-39845.1 (SEQ ID NO: 737), or a modified or unmodified variant thereof.

[1566] A RNAi agent comprising a first and a second strand, wherein the sequence of the first strand is the sequence of a first strand of: AD-39851.1 (SEQ ID NO: 738), or a modified or unmodified variant thereof.

[1567] A RNAi agent comprising a first and a second strand, wherein the sequence of the first strand is the sequence of a first strand of: AD-39857.1 (SEQ ID NO: 739), or a modified or unmodified variant thereof.

[1568] A RNAi agent comprising a first and a second strand, wherein the sequence of the first strand is the sequence of a first strand of: AD-39863.1 (SEQ ID NO: 740), or a modified or unmodified variant thereof.

[1569] A RNAi agent comprising a first and a second strand, wherein the sequence of the first strand is the sequence of a first strand of: AD-39869.1 (SEQ ID NO: 741), or a modified or unmodified variant thereof.

[1570] A RNAi agent comprising a first and a second strand, wherein the sequence of the first strand is the sequence of a first strand of: AD-39828.1 (SEQ ID NO: 742), or a modified or unmodified variant thereof.

[1571] A RNAi agent comprising a first and a second strand, wherein the sequence of the first strand is the sequence of a first strand of: AD-39834.1 (SEQ ID NO: 743), or a modified or unmodified variant thereof.

[1572] A RNAi agent comprising a first and a second strand, wherein the sequence of the first strand is the sequence of a first strand of: AD-39840.1 (SEQ ID NO: 744), or a modified or unmodified variant thereof.

[1573] A RNAi agent comprising a first and a second strand, wherein the sequence of the first strand is the sequence of a first strand of: AD-39846.1 (SEQ ID NO: 745), or a modified or unmodified variant thereof.

[1574] A RNAi agent comprising a first and a second strand, wherein the sequence of the first strand is the sequence of a first strand of: AD-39852.1 (SEQ ID NO: 746), or a modified or unmodified variant thereof.

[1575] A RNAi agent comprising a first and a second strand, wherein the sequence of the first strand is the sequence of a first strand of: AD-39858.1 (SEQ ID NO: 747), or a modified or unmodified variant thereof.

[1576] A RNAi agent comprising a first and a second strand, wherein the sequence of the first strand is the sequence of a first strand of: AD-39864.1 (SEQ ID NO: 748), or a modified or unmodified variant thereof.

[1577] A RNAi agent comprising a first and a second strand, wherein the sequence of the first strand is the sequence of a first strand of: AD-39870.1 (SEQ ID NO: 749), or a modified or unmodified variant thereof.

[1578] A RNAi agent comprising a first and a second strand, wherein the sequence of the first strand is the sequence of a first strand of: AD-39829.1 (SEQ ID NO: 750), or a modified or unmodified variant

[1579] A RNAi agent comprising a first and a second strand, wherein the sequence of the first strand is the sequence of a first strand of: AD-39835.1 (SEQ ID NO: 751), or a modified or unmodified variant thereof.

[1580] A RNAi agent comprising a first and a second strand, wherein the sequence of the first strand is the sequence of a first strand of: AD-39841.1 (SEQ ID NO: 752), or a modified or unmodified variant thereof.

[1581] A RNAi agent comprising a first and a second strand, wherein the sequence of the first strand is the sequence of a first strand of: AD-39853.1 (SEQ ID NO: 753), or a modified or unmodified variant thereof.

[1582] A RNAi agent comprising a first and a second strand, wherein the sequence of the first strand is the sequence of a first strand of: AD-39859.1 (SEQ ID NO: 754), or a modified or unmodified variant thereof.

[1583] A RNAi agent comprising a first and a second strand, wherein the sequence of the first strand is the sequence of a first strand of: AD-39865.1 (SEQ ID NO: 755), or a modified or unmodified variant thereof.

[1584] A RNAi agent comprising a first and a second strand, wherein the sequence of the first strand is the sequence of a first strand of: AD-39871.1 (SEQ ID NO: 756), or a modified or unmodified variant thereof.

[1585] A RNAi agent comprising a first and a second strand, wherein the sequence of the first strand is the sequence of a first strand of: AD-39830.1 (SEQ ID NO: 757), or a modified or unmodified variant thereof.

[1586] A RNAi agent comprising a first and a second strand, wherein the sequence of the first strand is the sequence of a first strand of: AD-39836.1 (SEQ ID NO: 758), or a modified or unmodified variant thereof.

[1587] A RNAi agent comprising a first and a second strand, wherein the sequence of the first strand is the sequence of a first strand of: AD-39842.1 (SEQ ID NO: 759), or a modified or unmodified variant thereof.

[1588] A RNAi agent comprising a first and a second strand, wherein the sequence of the first strand is the sequence of a first strand of: AD-39848.1 (SEQ ID NO: 760), or a modified or unmodified variant thereof.

[1589] A RNAi agent comprising a first and a second strand, wherein the sequence of the first strand is the sequence of a first strand of: AD-39854.1 (SEQ ID NO: 761), or a modified or unmodified variant thereof.

[1590] A RNAi agent comprising a first and a second strand, wherein the sequence of the first strand is the sequence of a first strand of: AD-39860.1 (SEQ ID NO: 762), or a modified or unmodified variant thereof.

[1591] A RNAi agent comprising a first and a second strand, wherein the sequence of the first strand is the sequence of a first strand of: AD-39866.1 (SEQ ID NO: 763), or a modified or unmodified variant thereof.

[1592] A RNAi agent comprising a first and a second strand, wherein the sequence of the first strand is the sequence of a first strand of: AD-39992.1 (SEQ ID NO: 764), or a modified or unmodified variant thereof.

[1593] A RNAi agent comprising a first and a second strand, wherein the sequence of the first strand is the sequence of a first strand of: AD-39998.1 (SEQ ID NO: 765), or a modified or unmodified variant thereof.

[1594] A RNAi agent comprising a first and a second strand, wherein the sequence of the first strand is the sequence of a first strand of: AD-40004.1 (SEQ ID NO: 766), or a modified or unmodified variant thereof.

[1595] A RNAi agent comprising a first and a second strand, wherein the sequence of the first strand is the sequence of a first strand of: AD-40010.1 (SEQ ID NO: 767), or a modified or unmodified variant thereof.

[1596] A RNAi agent comprising a first and a second strand, wherein the sequence of the first strand is the sequence of a first strand of: AD-40016.1 (SEQ ID NO: 768), or a modified or unmodified variant thereof.

[1597] A RNAi agent comprising a first and a second strand, wherein the sequence of the first strand is the sequence of a first strand of: AD-40022.1 (SEQ ID NO: 769), or a modified or unmodified variant thereof.

[1598] A RNAi agent comprising a first and a second strand, wherein the sequence of the first strand is the sequence of a first strand of: AD-40028.1 (SEQ ID NO: 770), or a modified or unmodified variant thereof.

[1599] A RNAi agent comprising a first and a second strand, wherein the sequence of the first strand is the sequence of a first strand of: AD-40034.1 (SEQ ID NO: 771), or a modified or unmodified variant thereof.

[1600] A RNAi agent comprising a first and a second strand, wherein the sequence of the first strand is the sequence of a first strand of: AD-39999.1 (SEQ ID NO: 772), or a modified or unmodified variant thereof.

[1601] A RNAi agent comprising a first and a second strand, wherein the sequence of the first strand is the sequence of a first strand of: AD-40005.1 (SEQ ID NO: 773), or a modified or unmodified variant thereof.

[1602] A RNAi agent comprising a first and a second strand, wherein the sequence of the first strand is the sequence of a first strand of: AD-40011.1 (SEQ ID NO: 774), or a modified or unmodified variant thereof.

[1603] A RNAi agent comprising a first and a second strand, wherein the sequence of the first strand is the sequence of a first strand of: AD-40017.1 (SEQ ID NO: 775), or a modified or unmodified variant thereof.

[1604] A RNAi agent comprising a first and a second strand, wherein the sequence of the first strand is the sequence of a first strand of: AD-40029.1 (SEQ ID NO: 776), or a modified or unmodified variant thereof.

[1605] A RNAi agent comprising a first and a second strand, wherein the sequence of the first strand is the sequence of a first strand of: AD-40035.1 (SEQ ID NO: 777), or a modified or unmodified variant thereof.

[1606] A RNAi agent comprising a first and a second strand, wherein the sequence of the first strand is the sequence of a first strand of: AD-39994.1 (SEQ ID NO: 778), or a modified or unmodified variant thereof.

[1607] A RNAi agent comprising a first and a second strand, wherein the sequence of the first strand is the sequence of a first strand of: AD-40000.1 (SEQ ID NO: 779), or a modified or unmodified variant thereof.

[1608] A RNAi agent comprising a first and a second strand, wherein the sequence of the first strand is the sequence of a first strand of: AD-40006.1 (SEQ ID NO: 780), or a modified or unmodified variant thereof.

[1609] A RNAi agent comprising a first and a second strand, wherein the sequence of the first strand is the sequence of a first strand of: AD-40012.1 (SEQ ID NO: 781), or a modified or unmodified variant thereof.

[1610] A RNAi agent comprising a first and a second strand, wherein the sequence of the first strand is the sequence of a first strand of: AD-40018.1 (SEQ ID NO: 782), or a modified or unmodified variant thereof.

[1611] A RNAi agent comprising a first and a second strand, wherein the sequence of the first strand is the sequence of a first strand of: AD-40024.1 (SEQ ID NO: 783), or a modified or unmodified variant thereof.

[1612] A RNAi agent comprising a first and a second strand, wherein the sequence of the first strand is the sequence of a first strand of: AD-40030.1 (SEQ ID NO: 784), or a modified or unmodified variant thereof.

[1613] A RNAi agent comprising a first and a second strand, wherein the sequence of the first strand is the sequence of a first strand of: AD-40036.1 (SEQ ID NO: 785), or a modified or unmodified variant thereof.

[1614] A RNAi agent comprising a first and a second strand, wherein the sequence of the first strand is the sequence of a first strand of: AD-39995.1 (SEQ ID NO: 786), or a modified or unmodified variant thereof.

[1615] A RNAi agent comprising a first and a second strand, wherein the sequence of the first strand is the sequence of a first strand of: AD-40001.1 (SEQ ID NO: 787), or a modified or unmodified variant thereof.

[1616] A RNAi agent comprising a first and a second strand, wherein the sequence of the first strand is the sequence of a first strand of: AD-40007.1 (SEQ ID NO: 788), or a modified or unmodified variant thereof.

[1617] A RNAi agent comprising a first and a second strand, wherein the sequence of the first strand is the sequence of a first strand of: AD-40013.1 (SEQ ID NO: 789), or a modified or unmodified variant thereof.

[1618] A RNAi agent comprising a first and a second strand, wherein the sequence of the first strand is the sequence of a first strand of: AD-40019.1 (SEQ ID NO: 790), or a modified or unmodified variant

[1619] A RNAi agent comprising a first and a second strand, wherein the sequence of the first strand is the sequence of a first strand of: AD-40025.1 (SEQ ID NO: 791), or a modified or unmodified variant thereof.

[1620] A RNAi agent comprising a first and a second strand, wherein the sequence of the first strand is the sequence of a first strand of: AD-40031.1 (SEQ ID NO: 792), or a modified or unmodified variant thereof.

[1621] A RNAi agent comprising a first and a second strand, wherein the sequence of the first strand is the sequence of a first strand of: AD-40037.1 (SEQ ID NO: 793), or a modified or unmodified variant thereof.

[1622] A RNAi agent comprising a first and a second strand, wherein the sequence of the first strand is the sequence of a first strand of: AD-39996.1 (SEQ ID NO: 794), or a modified or unmodified variant thereof.

[1623] A RNAi agent comprising a first and a second strand, wherein the sequence of the first strand is the sequence of a first strand of: AD-40002.1 (SEQ ID NO: 795), or a modified or unmodified variant thereof.

[1624] A RNAi agent comprising a first and a second strand, wherein the sequence of the first strand is the sequence of a first strand of: AD-40008.1 (SEQ ID NO: 796), or a modified or unmodified variant thereof.

[1625] A RNAi agent comprising a first and a second strand, wherein the sequence of the first strand is the sequence of a first strand of: AD-40014.1 (SEQ ID NO: 797), or a modified or unmodified variant thereof.

[1626] A RNAi agent comprising a first and a second strand, wherein the sequence of the first strand is the sequence of a first strand of: AD-40020.1 (SEQ ID NO: 798), or a modified or unmodified variant thereof.

[1627] A RNAi agent comprising a first and a second strand, wherein the sequence of the first strand is the sequence of a first strand of: AD-40026.1 (SEQ ID NO: 799), or a modified or unmodified variant thereof.

[1628] A RNAi agent comprising a first and a second strand, wherein the sequence of the first strand is the sequence of a first strand of: AD-40032.1 (SEQ ID NO: 800), or a modified or unmodified variant thereof.

[1629] A RNAi agent comprising a first and a second strand, wherein the sequence of the first strand is the sequence of a first strand of: AD-40038.1 (SEQ ID NO: 801), or a modified or unmodified variant thereof.

[1630] A RNAi agent comprising a first and a second strand, wherein the sequence of the first strand is the sequence of a first strand of: AD-39997.1 (SEQ ID NO: 802), or a modified or unmodified variant thereof.

[1631] A RNAi agent comprising a first and a second strand, wherein the sequence of the first strand is the sequence of a first strand of: AD-40009.1 (SEQ ID NO: 803), or a modified or unmodified variant thereof.

[1632] A RNAi agent comprising a first and a second strand, wherein the sequence of the first strand is the sequence of a first strand of: AD-40015.1 (SEQ ID NO: 804), or a modified or unmodified variant thereof.

[1633] A RNAi agent comprising a first and a second strand, wherein the sequence of the first strand is the sequence of a first strand of: AD-40021.1 (SEQ ID NO: 805), or a modified or unmodified variant thereof.

[1634] A RNAi agent comprising a first and a second strand, wherein the sequence of the first strand is the sequence of a first strand of: AD-40027.1 (SEQ ID NO: 806), or a modified or unmodified variant thereof.

[1635] A RNAi agent comprising a first and a second strand, wherein the sequence of the first strand is the sequence of a first strand of: AD-40033.1 (SEQ ID NO: 807), or a modified or unmodified variant thereof.

[1636] A RNAi agent comprising a first and a second strand, wherein the sequence of the first strand is the sequence of a first strand of: AD-40039.1 (SEQ ID NO: 808), or a modified or unmodified variant thereof.

[1637] A RNAi agent comprising a first and a second strand, wherein the sequence of the first strand is the sequence of a first strand of: AD-40045.1 (SEQ ID NO: 809), or a modified or unmodified variant thereof.

[1638] A RNAi agent comprising a first and a second strand, wherein the sequence of the first strand is the sequence of a first strand of: AD-40051.1 (SEQ ID NO: 810), or a modified or unmodified variant thereof.

[1639] A RNAi agent comprising a first and a second strand, wherein the sequence of the first strand is the sequence of a first strand of: AD-40057.1 (SEQ ID NO: 811), or a modified or unmodified variant thereof.

[1640] A RNAi agent comprising a first and a second strand, wherein the sequence of the first strand is the sequence of a first strand of: AD-40063.1 (SEQ ID NO: 812), or a modified or unmodified variant thereof.

[1641] A RNAi agent comprising a first and a second strand, wherein the sequence of the first strand is the sequence of a first strand of: AD-40069.1 (SEQ ID NO: 813), or a modified or unmodified variant thereof.

[1642] A RNAi agent comprising a first and a second strand, wherein the sequence of the first strand is the sequence of a first strand of: AD-40075.1 (SEQ ID NO: 814), or a modified or unmodified variant thereof.

[1643] A RNAi agent comprising a first and a second strand, wherein the sequence of the first strand is the sequence of a first strand of: AD-40081.1 (SEQ ID NO: 815), or a modified or unmodified variant thereof.

[1644] A RNAi agent comprising a first and a second strand, wherein the sequence of the first strand is the sequence of a first strand of: AD-40040.1 (SEQ ID NO: 816), or a modified or unmodified variant thereof.

[1645] A RNAi agent comprising a first and a second strand, wherein the sequence of the first strand is the sequence of a first strand of: AD-40046.1 (SEQ ID NO: 817), or a modified or unmodified variant thereof.

[1646] A RNAi agent comprising a first and a second strand, wherein the sequence of the first strand is the sequence of a first strand of: AD-40052.1 (SEQ ID NO: 818), or a modified or unmodified variant thereof.

[1647] A RNAi agent comprising a first and a second strand, wherein the sequence of the first strand is the sequence of a first strand of: AD-40058.1 (SEQ ID NO: 819), or a modified or unmodified variant thereof.

[1648] A RNAi agent comprising a first and a second strand, wherein the sequence of the first strand is the sequence of a first strand of: AD-40064.1 (SEQ ID NO: 820), or a modified or unmodified variant thereof.

[1649] A RNAi agent comprising a first and a second strand, wherein the sequence of the first strand is the sequence of a first strand of: AD-40070.1 (SEQ ID NO: 821), or a modified or unmodified variant thereof.

[1650] A RNAi agent comprising a first and a second strand, wherein the sequence of the first strand is the sequence of a first strand of: AD-40076.1 (SEQ ID NO: 822), or a modified or unmodified variant thereof.

[1651] A RNAi agent comprising a first and a second strand, wherein the sequence of the first strand is the sequence of a first strand of: AD-40082.1 (SEQ ID NO: 823), or a modified or unmodified variant thereof.

[1652] A RNAi agent comprising a first and a second strand, wherein the sequence of the first strand is the sequence of a first strand of: AD-40041.1 (SEQ ID NO: 824), or a modified or unmodified variant thereof.

[1653] A RNAi agent comprising a first and a second strand, wherein the sequence of the first strand is the sequence of a first strand of: AD-40047.1 (SEQ ID NO: 825), or a modified or unmodified variant thereof.

[1654] A RNAi agent comprising a first and a second strand, wherein the sequence of the first strand is the sequence of a first strand of: AD-40053.1 (SEQ ID NO: 826), or a modified or unmodified variant thereof.

[1655] A RNAi agent comprising a first and a second strand, wherein the sequence of the first strand is the sequence of a first strand of: AD-40059.1 (SEQ ID NO: 827), or a modified or unmodified variant thereof.

[1656] A RNAi agent comprising a first and a second strand, wherein the sequence of the first strand is the sequence of a first strand of: AD-40065.1 (SEQ ID NO: 828), or a modified or unmodified variant thereof.

[1657] A RNAi agent comprising a first and a second strand, wherein the sequence of the first strand is the sequence of a first strand of: AD-40071.1 (SEQ ID NO: 829), or a modified or unmodified variant thereof.

[1658] A RNAi agent comprising a first and a second strand, wherein the sequence of the first strand is the sequence of a first strand of: AD-40077.1 (SEQ ID NO: 830), or a modified or unmodified variant

[1659] A RNAi agent comprising a first and a second strand, wherein the sequence of the first strand is the sequence of a first strand of: AD-40083.1 (SEQ ID NO: 831), or a modified or unmodified variant thereof.

[1660] A RNAi agent comprising a first and a second strand, wherein the sequence of the first strand is the sequence of a first strand of: AD-40042.1 (SEQ ID NO: 832), or a modified or unmodified variant thereof.

[1661] A RNAi agent comprising a first and a second strand, wherein the sequence of the first strand is the sequence of a first strand of: AD-40048.1 (SEQ ID NO: 833), or a modified or unmodified variant thereof.

[1662] A RNAi agent comprising a first and a second strand, wherein the sequence of the first strand is the sequence of a first strand of: AD-40054.1 (SEQ ID NO: 834), or a modified or unmodified variant thereof.

[1663] A RNAi agent comprising a first and a second strand, wherein the sequence of the first strand is the sequence of a first strand of: AD-40060.1 (SEQ ID NO: 835), or a modified or unmodified variant thereof.

[1664] A RNAi agent comprising a first and a second strand, wherein the sequence of the first strand is the sequence of a first strand of: AD-40066.1 (SEQ ID NO: 836), or a modified or unmodified variant thereof.

[1665] A RNAi agent comprising a first and a second strand, wherein the sequence of the first strand is the sequence of a first strand of: AD-40072.1 (SEQ ID NO: 837), or a modified or unmodified variant thereof.

[1666] A RNAi agent comprising a first and a second strand, wherein the sequence of the first strand is the sequence of a first strand of: AD-40078.1 (SEQ ID NO: 838), or a modified or unmodified variant thereof.

[1667] A RNAi agent comprising a first and a second strand, wherein the sequence of the first strand is the sequence of a first strand of: AD-40084.1 (SEQ ID NO: 839), or a modified or unmodified variant thereof.

[1668] A RNAi agent comprising a first and a second strand, wherein the sequence of the first strand is the sequence of a first strand of: AD-40043.1 (SEQ ID NO: 840), or a modified or unmodified variant thereof.

[1669] A RNAi agent comprising a first and a second strand, wherein the sequence of the first strand is the sequence of a first strand of: AD-40049.1 (SEQ ID NO: 841), or a modified or unmodified variant thereof.

[1670] A RNAi agent comprising a first and a second strand, wherein the sequence of the first strand is the sequence of a first strand of: AD-40055.1 (SEQ ID NO: 842), or a modified or unmodified variant thereof.

[1671] A RNAi agent comprising a first and a second strand, wherein the sequence of the first strand is the sequence of a first strand of: AD-40061.1 (SEQ ID NO: 843), or a modified or unmodified variant thereof.

[1672] A RNAi agent comprising a first and a second strand, wherein the sequence of the first strand is the sequence of a first strand of: AD-40067.1 (SEQ ID NO: 844), or a modified or unmodified variant thereof.

[1673] A RNAi agent comprising a first and a second strand, wherein the sequence of the first strand is the sequence of a first strand of: AD-40073.1 (SEQ ID NO: 845), or a modified or unmodified variant thereof.

[1674] A RNAi agent comprising a first and a second strand, wherein the sequence of the first strand is the sequence of a first strand of: AD-40079.1 (SEQ ID NO: 846), or a modified or unmodified variant thereof.

[1675] A RNAi agent comprising a first and a second strand, wherein the sequence of the first strand is the sequence of a first strand of: AD-40085.1 (SEQ ID NO: 847), or a modified or unmodified variant thereof.

[1676] A RNAi agent comprising a first and a second strand, wherein the sequence of the first strand is the sequence of a first strand of: AD-40044.1 (SEQ ID NO: 848), or a modified or unmodified variant thereof.

[1677] A RNAi agent comprising a first and a second strand, wherein the sequence of the first strand is the sequence of a first strand of: AD-40050.1 (SEQ ID NO: 849), or a modified or unmodified variant thereof.

[1678] A RNAi agent comprising a first and a second strand, wherein the sequence of the first strand is the sequence of a first strand of: AD-40056.1 (SEQ ID NO: 850), or a modified or unmodified variant thereof.

[1679] A RNAi agent comprising a first and a second strand, wherein the sequence of the first strand is the sequence of a first strand of: AD-40062.1 (SEQ ID NO: 851), or a modified or unmodified variant thereof.

[1680] A RNAi agent comprising a first and a second strand, wherein the sequence of the first strand is the sequence of a first strand of: AD-40068.1 (SEQ ID NO: 852), or a modified or unmodified variant thereof.

[1681] A RNAi agent comprising a first and a second strand, wherein the sequence of the first strand is the sequence of a first strand of: AD-40074.1 (SEQ ID NO: 853), or a modified or unmodified variant thereof.

[1682] A RNAi agent comprising a first and a second strand, wherein the sequence of the first strand is the sequence of a first strand of: AD-40080.1 (SEQ ID NO: 854), or a modified or unmodified variant thereof.

[1683] A RNAi agent comprising a first and a second strand, wherein the sequence of the first strand is the sequence of a first strand of: AD-39720.1 (SEQ ID NOs: 1716 and 1754), or a modified or unmodified variant thereof.

[1684] A RNAi agent comprising a first and a second strand, wherein the sequence of the first strand is the sequence of a first strand of: AD-39706.1 (SEQ ID NOs: 1717 and 1755), or a modified or unmodified variant thereof.

[1685] A RNAi agent comprising a first and a second strand, wherein the sequence of the first strand is the sequence of a first strand of: AD-39712.1 (SEQ ID NOs: 1718 and 1756), or a modified or unmodified variant thereof.

[1686] A RNAi agent comprising a first and a second strand, wherein the sequence of the first strand is the sequence of a first strand of: AD-39760.1 (SEQ ID NOs: 1719 and 1757), or a modified or unmodified variant thereof.

[1687] A RNAi agent comprising a first and a second strand, wherein the sequence of the first strand is the sequence of a first strand of: AD-39732.1 (SEQ ID NOs: 1720 and 1758), or a modified or unmodified variant thereof.

[1688] A RNAi agent comprising a first and a second strand, wherein the sequence of the first strand is the sequence of a first strand of: AD-35541.4 (SEQ ID NOs: 1721 and 1759), or a modified or unmodified variant thereof.

[1689] A RNAi agent comprising a first and a second strand, wherein the sequence of the first strand is the sequence of a first strand of: AD-39735.1 or hs_KRAS_321_A22S26 (SEQ ID NOs: 1722 and 1760), or a modified or unmodified variant thereof.

[1690] A RNAi agent comprising a first and a second strand, wherein the sequence of the first strand is the sequence of a first strand of: AD-39741.1, or modified or unmodified variants thereof.

[1691] A RNAi agent comprising a first and a second strand, wherein the sequence of the first strand is the sequence of a first strand of: hs_KRAS_322_A22S26 (SEQ ID NOs: 1723 and 1761), or a modified or unmodified variant thereof.

[1692] A RNAi agent comprising a first and a second strand, wherein the sequence of the first strand is the sequence of a first strand of: AD-39778.1 (SEQ ID NOs: 1724 and 1762), or a modified or unmodified variant thereof.

[1693] A RNAi agent comprising a first and a second strand, wherein the sequence of the first strand is the sequence of a first strand of: AD-39790.1 (SEQ ID NOs: 1725 and 1763), or a modified or unmodified variant thereof.

[1694] A RNAi agent comprising a first and a second strand, wherein the sequence of the first strand is the sequence of a first strand of: AD-39822.1 (SEQ ID NOs: 1726 and 1764), or a modified or unmodified variant thereof.

[1695] A RNAi agent comprising a first and a second strand, wherein the sequence of the first strand is the sequence of a first strand of: AD-35609.4 (SEQ ID NOs: 1727 and 1765), or a modified or unmodified variant thereof.

[1696] A RNAi agent comprising a first and a second strand, wherein the sequence of the first strand is the sequence of a first strand of: AD-35581.4 (SEQ ID NOs: 1728 and 1766), or a modified or unmodified variant thereof.

[1697] A RNAi agent comprising a first and a second strand, wherein the sequence of the first strand is the sequence of a first strand of: AD-39845.1 (SEQ ID NOs: 1729 and 1767), or a modified or unmodified variant thereof.

[1698] A RNAi agent comprising a first and a second strand, wherein the sequence of the first strand is the sequence of a first strand of: AD-39858.1 (SEQ ID NOs: 1730 and 1768), or a modified or unmodified variant thereof.

[1699] A RNAi agent comprising a first and a second strand, wherein the sequence of the first strand is the sequence of a first strand of: AD-39870.1 (SEQ ID NOs: 1731 and 1769), or a modified or unmodified variant thereof.

[1700] A RNAi agent comprising a first and a second strand, wherein the sequence of the first strand is the sequence of a first strand of: AD-35576.4 (SEQ ID NOs: 1732 and 1770), or a modified or unmodified variant thereof.

[1701] A RNAi agent comprising a first and a second strand, wherein the sequence of the first strand is the sequence of a first strand of: AD-35588.4 (SEQ ID NOs: 1733 and 1771), or a modified or unmodified variant thereof.

[1702] A RNAi agent comprising a first and a second strand, wherein the sequence of the first strand is the sequence of a first strand of: AD-35600.1 (SEQ ID NOs: 1734 and 1772), or a modified or unmodified variant thereof.

[1703] A RNAi agent comprising a first and a second strand, wherein the sequence of the first strand is the sequence of a first strand of: AD-35606.1 (SEQ ID NOs: 1735 and 1773), or a modified or unmodified variant thereof.

[1704] A RNAi agent comprising a first and a second strand, wherein the sequence of the first strand is the sequence of a first strand of: AD-38151.1 (SEQ ID NOs: 1736 and 1774), or a modified or unmodified variant thereof.

[1705] A RNAi agent comprising a first and a second strand, wherein the sequence of the first strand is the sequence of a first strand of: AD-38163.1 (SEQ ID NOs: 1737 and 1775), or a modified or unmodified variant thereof.

[1706] A RNAi agent comprising a first and a second strand, wherein the sequence of the first strand is the sequence of a first strand of: AD-39999.1 (SEQ ID NOs: 1738 and 1776), or a modified or unmodified variant thereof.

[1707] A RNAi agent comprising a first and a second strand, wherein the sequence of the first strand is the sequence of a first strand of: AD-38159.1 or hs_KRAS_528_A22S26 (SEQ ID NOs: 1739 and 1777), or a modified or unmodified variant thereof.

[1708] A RNAi agent comprising a first and a second strand, wherein the sequence of the first strand is the sequence of a first strand of: AD-38130.1 or hs_KRAS_531_A22S26 (SEQ ID NOs: 1740 and 1778), or a modified or unmodified variant thereof.

[1709] A RNAi agent comprising a first and a second strand, wherein the sequence of the first strand is the sequence of a first strand of: AD-38136.1 (SEQ ID NOs: 1741 and 1779), or a modified or unmodified variant thereof.

[1710] A RNAi agent comprising a first and a second strand, wherein the sequence of the first strand is the sequence of a first strand of: AD-40036.1 (SEQ ID NOs: 1742 and 1780), or a modified or unmodified variant thereof.

[1711] A RNAi agent comprising a first and a second strand, wherein the sequence of the first strand is the sequence of a first strand of: AD-40008.1 (SEQ ID NOs: 1743 and 1781), or a modified or unmodified variant thereof.

[1712] A RNAi agent comprising a first and a second strand, wherein the sequence of the first strand is the sequence of a first strand of: AD-40021.1 (SEQ ID NOs: 1744 and 1782), or a modified or unmodified variant thereof.

[1713] A RNAi agent comprising a first and a second strand, wherein the sequence of the first strand is the sequence of a first strand of: AD-40077.1 (SEQ ID NOs: 1745 and 1783), or a modified or unmodified variant thereof.

[1714] A RNAi agent comprising a first and a second strand, wherein the sequence of the first strand is the sequence of a first strand of: AD-40072.1 (SEQ ID NOs: 1746 and 1784), or a modified or unmodified variant thereof.

[1715] A RNAi agent comprising a first and a second strand, wherein the sequence of the first strand is the sequence of a first strand of: AD-40061.1 (SEQ ID NOs: 1747 and 1785), or a modified or unmodified variant thereof.

[1716] A RNAi agent comprising a first and a second strand, wherein the sequence of the first strand is the sequence of a first strand of: AD-40068.1 (SEQ ID NOs: 1748 and 1786), or a modified or unmodified variant thereof.

[1717] A RNAi agent comprising a first and a second strand, wherein the sequence of the first strand is the sequence of a first strand of: AD-38131.1 (SEQ ID NOs: 1749 and 1787), or a modified or unmodified variant thereof.

[1718] A RNAi agent comprising a first and a second strand, wherein the sequence of the first strand is the sequence of a first strand of: AD-38167.1 (SEQ ID NOs: 1750 and 1788), or a modified or unmodified variant thereof.

[1719] A RNAi agent comprising a first and a second strand, wherein the sequence of the first strand is the sequence of a first strand of: hs_KRAS 1273_A22S26 (SEQ ID NOs: 1751 and 1789), or a modified or unmodified variant thereof.

[1720] A RNAi agent comprising a first and a second strand, wherein the sequence of the first strand is the sequence of a first strand of: hs_KRAS 2892_A37S26 (SEQ ID NOs: 1752 and 1790), or a modified or unmodified variant thereof.

[1721] A RNAi agent comprising a first and a second strand, wherein the sequence of the first strand is the sequence of a first strand of: hs_KRAS 4731_A22S26 (SEQ ID NOs: 1753 and 1791), or a modified or unmodified variant thereof.

Specific Embodiments Comprising the First and/or Second Strands of a RNAi Agent Disclosed Herein

[1722] In one embodiment, the present disclosure pertains to a composition comprising any one or more of: a RNAi agent comprising a first and a second strand, wherein the sequences of the first and/or second strands comprise the sequences of a first and/or second strand of any RNAi agent from any of Tables 1 to 6, or modified and unmodified variants thereof.

[1723] Thus, in various embodiments, the present disclosure pertains to a composition comprising any one or more of the following:

[1724] A RNAi agent comprising a first and a second strand, wherein the sequences of the first and/or second strands comprise the sequences of a first and/or second strand of: AD-35523.3 (SEQ ID NOs: 1 and 428), or a modified or unmodified variant thereof.

[1725] A RNAi agent comprising a first and a second strand, wherein the sequences of the first and/or second strands comprise the sequences of a first and/or second strand of: AD-35529.1 (SEQ ID NOs: 2 and 429), or a modified or unmodified variant thereof.

[1726] A RNAi agent comprising a first and a second strand, wherein the sequences of the first and/or second strands comprise the sequences of a first and/or second strand of: AD-35535.4 (SEQ ID NOs: 3 and 430), or a modified or unmodified variant thereof.

[1727] A RNAi agent comprising a first and a second strand, wherein the sequences of the first and/or second strands comprise the sequences of a first and/or second strand of: AD-35541.4 (SEQ ID NOs: 4 and 431), or a modified or unmodified variant thereof.

[1728] A RNAi agent comprising a first and a second strand, wherein the sequences of the first and/or second strands comprise the sequences of a first and/or second strand of: AD-35547.4 (SEQ ID NOs: 5 and 432), or a modified or unmodified variant thereof.

[1729] A RNAi agent comprising a first and a second strand, wherein the sequences of the first and/or second strands comprise the sequences of a first and/or second strand of: AD-35553.4 (SEQ ID NOs: 6 and 433), or a modified or unmodified variant thereof.

[1730] A RNAi agent comprising a first and a second strand, wherein the sequences of the first and/or second strands comprise the sequences of a first and/or second strand of: AD-35559.4 (SEQ ID NOs: 7 and 434), or a modified or unmodified variant thereof.

[1731] A RNAi agent comprising a first and a second strand, wherein the sequences of the first and/or second strands comprise the sequences of a first and/or second strand of: AD-35565.4 (SEQ ID NOs: 8 and 435), or a modified or unmodified variant thereof.

[1732] A RNAi agent comprising a first and a second strand, wherein the sequences of the first and/or second strands comprise the sequences of a first and/or second strand of: AD-35524.4 (SEQ ID NOs: 9 and 436), or a modified or unmodified variant thereof.

[1733] A RNAi agent comprising a first and a second strand, wherein the sequences of the first and/or second strands comprise the sequences of a first and/or second strand of: AD-35530.4 (SEQ ID NOs: 10 and 437), or a modified or unmodified variant thereof.

[1734] A RNAi agent comprising a first and a second strand, wherein the sequences of the first and/or second strands comprise the sequences of a first and/or second strand of: AD-35536.4 (SEQ ID NOs: 11 and 438), or a modified or unmodified variant thereof.

[1735] A RNAi agent comprising a first and a second strand, wherein the sequences of the first and/or second strands comprise the sequences of a first and/or second strand of: AD-35542.4 (SEQ ID NOs: 12 and 439), or a modified or unmodified variant thereof.

[1736] A RNAi agent comprising a first and a second strand, wherein the sequences of the first and/or second strands comprise the sequences of a first and/or second strand of: AD-35548.4 (SEQ ID NOs: 13 and 440), or a modified or unmodified variant thereof.

[1737] A RNAi agent comprising a first and a second strand, wherein the sequences of the first and/or second strands comprise the sequences of a first and/or second strand of: AD-35554.4 (SEQ ID NOs: 14 and 441), or a modified or unmodified variant thereof.

[1738] A RNAi agent comprising a first and a second strand, wherein the sequences of the first and/or second strands comprise the sequences of a first and/or second strand of: AD-35560.2 (SEQ ID NOs: 15 and 442), or a modified or unmodified variant thereof.

[1739] A RNAi agent comprising a first and a second strand, wherein the sequences of the first and/or second strands comprise the sequences of a first and/or second strand of: AD-35566.4 (SEQ ID NOs: 16 and 443), or a modified or unmodified variant thereof.

[1740] A RNAi agent comprising a first and a second strand, wherein the sequences of the first and/or second strands comprise the sequences of a first and/or second strand of: AD-35525.2 (SEQ ID NOs: 17 and 444), or a modified or unmodified variant thereof.

[1741] A RNAi agent comprising a first and a second strand, wherein the sequences of the first and/or second strands comprise the sequences of a first and/or second strand of: AD-35531.4 (SEQ ID NOs: 18 and 445), or a modified or unmodified variant thereof.

[1742] A RNAi agent comprising a first and a second strand, wherein the sequences of the first and/or second strands comprise the sequences of a first and/or second strand of: AD-35537.4 (SEQ ID NOs: 19 and 446), or a modified or unmodified variant thereof.

[1743] A RNAi agent comprising a first and a second strand, wherein the sequences of the first and/or second strands comprise the sequences of a first and/or second strand of: AD-35543.2 (SEQ ID NOs: 20 and 447), or a modified or unmodified variant thereof.

[1744] A RNAi agent comprising a first and a second strand, wherein the sequences of the first and/or second strands comprise the sequences of a first and/or second strand of: AD-35549.4 (SEQ ID NOs: 21 and 448), or a modified or unmodified variant thereof.

[1745] A RNAi agent comprising a first and a second strand, wherein the sequences of the first and/or second strands comprise the sequences of a first and/or second strand of: AD-35555.4 (SEQ ID NOs: 22 and 449), or a modified or unmodified variant thereof.

[1746] A RNAi agent comprising a first and a second strand, wherein the sequences of the first and/or second strands comprise the sequences of a first and/or second strand of: AD-35561.4 (SEQ ID NOs: 23 and 450), or a modified or unmodified variant thereof.

[1747] A RNAi agent comprising a first and a second strand, wherein the sequences of the first and/or second strands comprise the sequences of a first and/or second strand of: AD-35567.4 (SEQ ID NOs: 24 and 451), or a modified or unmodified variant thereof.

[1748] A RNAi agent comprising a first and a second strand, wherein the sequences of the first and/or second strands comprise the sequences of a first and/or second strand of: AD-35526.4 (SEQ ID NOs: 25 and 452), or a modified or unmodified variant thereof.

[1749] A RNAi agent comprising a first and a second strand, wherein the sequences of the first and/or second strands comprise the sequences of a first and/or second strand of: AD-35532.4 (SEQ ID NOs: 26 and 453), or a modified or unmodified variant thereof. A RNAi agent comprising a first and a second strand, wherein the sequences of the first and/or second strands comprise the sequences of a first and/or second strand of: AD-35538.4 (SEQ ID NOs: 27 and 454), or a modified or unmodified variant thereof.

[1750] A RNAi agent comprising a first and a second strand, wherein the sequences of the first and/or second strands comprise the sequences of a first and/or second strand of: AD-35544.4 (SEQ ID NOs: 28 and 455), or a modified or unmodified variant thereof.

[1751] A RNAi agent comprising a first and a second strand, wherein the sequences of the first and/or second strands comprise the sequences of a first and/or second strand of: AD-35550.4 (SEQ ID NOs: 29 and 456), or a modified or unmodified variant thereof.

[1752] A RNAi agent comprising a first and a second strand, wherein the sequences of the first and/or second strands comprise the sequences of a first and/or second strand of: AD-35556.4 (SEQ ID NOs: 30 and 457), or a modified or unmodified variant thereof.

[1753] A RNAi agent comprising a first and a second strand, wherein the sequences of the first and/or second strands comprise the sequences of a first and/or second strand of: AD-35562.4 (SEQ ID NOs: 31 and 458), or a modified or unmodified variant thereof.

[1754] A RNAi agent comprising a first and a second strand, wherein the sequences of the first and/or second strands comprise the sequences of a first and/or second strand of: AD-35568.4 (SEQ ID NOs: 32 and 459), or a modified or unmodified variant thereof.

[1755] A RNAi agent comprising a first and a second strand, wherein the sequences of the first and/or second strands comprise the sequences of a first and/or second strand of: AD-35527.4 (SEQ ID NOs: 33 and 460), or a modified or unmodified variant thereof.

[1756] A RNAi agent comprising a first and a second strand, wherein the sequences of the first and/or second strands comprise the sequences of a first and/or second strand of: AD-35533.4 (SEQ ID NOs: 34 and 461), or a modified or unmodified variant thereof.

[1757] A RNAi agent comprising a first and a second strand, wherein the sequences of the first and/or second strands comprise the sequences of a first and/or second strand of: AD-35539.4 (SEQ ID NOs: 35 and 462), or a modified or unmodified variant thereof.

[1758] A RNAi agent comprising a first and a second strand, wherein the sequences of the first and/or second strands comprise the sequences of a first and/or second strand of: AD-35545.4 (SEQ ID NOs: 36 and 463), or a modified or unmodified variant thereof.

[1759] A RNAi agent comprising a first and a second strand, wherein the sequences of the first and/or second strands comprise the sequences of a first and/or second strand of: AD-35551.4 (SEQ ID NOs: 37 and 464), or a modified or unmodified variant thereof.

[1760] A RNAi agent comprising a first and a second strand, wherein the sequences of the first and/or second strands comprise the sequences of a first and/or second strand of: AD-35563.4 (SEQ ID NOs: 38 and 465), or a modified or unmodified variant thereof.

[1761] A RNAi agent comprising a first and a second strand, wherein the sequences of the first and/or second strands comprise the sequences of a first and/or second strand of: AD-35528.4 (SEQ ID NOs: 39 and 466), or a modified or unmodified variant thereof.

[1762] A RNAi agent comprising a first and a second strand, wherein the sequences of the first and/or second strands comprise the sequences of a first and/or second strand of: AD-35540.4 (SEQ ID NOs: 40 and 467), or a modified or unmodified variant thereof.

[1763] A RNAi agent comprising a first and a second strand, wherein the sequences of the first and/or second strands comprise the sequences of a first and/or second strand of: AD-35546.4 (SEQ ID NOs: 41 and 468), or a modified or unmodified variant thereof.

[1764] A RNAi agent comprising a first and a second strand, wherein the sequences of the first and/or second strands comprise the sequences of a first and/or second strand of: AD-35552.4 (SEQ ID NOs: 42 and 469), or a modified or unmodified variant thereof.

[1765] A RNAi agent comprising a first and a second strand, wherein the sequences of the first and/or second strands comprise the sequences of a first and/or second strand of: AD-35558.4 (SEQ ID NOs: 43 and 470), or a modified or unmodified variant thereof.

[1766] A RNAi agent comprising a first and a second strand, wherein the sequences of the first and/or second strands comprise the sequences of a first and/or second strand of: AD-35564.4 (SEQ ID NOs: 44 and 471), or a modified or unmodified variant thereof.

[1767] A RNAi agent comprising a first and a second strand, wherein the sequences of the first and/or second strands comprise the sequences of a first and/or second strand of: AD-35570.4 (SEQ ID NOs: 45 and 472), or a modified or unmodified variant thereof.

[1768] A RNAi agent comprising a first and a second strand, wherein the sequences of the first and/or second strands comprise the sequences of a first and/or second strand of: AD-35571.4 (SEQ ID NOs: 46 and 473), or a modified or unmodified variant thereof.

[1769] A RNAi agent comprising a first and a second strand, wherein the sequences of the first and/or second strands comprise the sequences of a first and/or second strand of: AD-35577.4 (SEQ ID NOs: 47 and 474), or a modified or unmodified variant thereof.

[1770] A RNAi agent comprising a first and a second strand, wherein the sequences of the first and/or second strands comprise the sequences of a first and/or second strand of: AD-35583.4 (SEQ ID NOs: 48 and 475), or a modified or unmodified variant thereof.

[1771] A RNAi agent comprising a first and a second strand, wherein the sequences of the first and/or second strands comprise the sequences of a first and/or second strand of: AD-35589.4 (SEQ ID NOs: 49 and 476), or a modified or unmodified variant thereof.

[1772] A RNAi agent comprising a first and a second strand, wherein the sequences of the first and/or second strands comprise the sequences of a first and/or second strand of: AD-35595.4 (SEQ ID NOs: 50 and 477), or a modified or unmodified variant thereof.

[1773] A RNAi agent comprising a first and a second strand, wherein the sequences of the first and/or second strands comprise the sequences of a first and/or second strand of: AD-35601.4 (SEQ ID NOs: 51 and 478), or a modified or unmodified variant thereof.

[1774] A RNAi agent comprising a first and a second strand, wherein the sequences of the first and/or second strands comprise the sequences of a first and/or second strand of: AD-35607.4 (SEQ ID NOs: 52 and 479), or a modified or unmodified variant thereof.

[1775] A RNAi agent comprising a first and a second strand, wherein the sequences of the first and/or second strands comprise the sequences of a first and/or second strand of: AD-35613.4 (SEQ ID NOs: 53 and 480), or a modified or unmodified variant thereof.

[1776] A RNAi agent comprising a first and a second strand, wherein the sequences of the first and/or second strands comprise the sequences of a first and/or second strand of: AD-35572.4 (SEQ ID NOs: 54 and 481), or a modified or unmodified variant thereof.

[1777] A RNAi agent comprising a first and a second strand, wherein the sequences of the first and/or second strands comprise the sequences of a first and/or second strand of: AD-35578.4 (SEQ ID NOs: 55 and 482), or a modified or unmodified variant thereof.

[1778] A RNAi agent comprising a first and a second strand, wherein the sequences of the first and/or second strands comprise the sequences of a first and/or second strand of: AD-35584.4 (SEQ ID NOs: 56 and 483), or a modified or unmodified variant thereof.

[1779] A RNAi agent comprising a first and a second strand, wherein the sequences of the first and/or second strands comprise the sequences of a first and/or second strand of: AD-35590.4 (SEQ ID NOs: 57 and 484), or a modified or unmodified variant thereof.

[1780] A RNAi agent comprising a first and a second strand, wherein the sequences of the first and/or second strands comprise the sequences of a first and/or second strand of: AD-35596.4 (SEQ ID NOs: 58 and 485), or a modified or unmodified variant thereof.

[1781] A RNAi agent comprising a first and a second strand, wherein the sequences of the first and/or second strands comprise the sequences of a first and/or second strand of: AD-35602.4 (SEQ ID NOs: 59 and 486), or a modified or unmodified variant thereof.

[1782] A RNAi agent comprising a first and a second strand, wherein the sequences of the first and/or second strands comprise the sequences of a first and/or second strand of: AD-35608.4 (SEQ ID NOs: 60 and 487), or a modified or unmodified variant thereof.

[1783] A RNAi agent comprising a first and a second strand, wherein the sequences of the first and/or second strands comprise the sequences of a first and/or second strand of: AD-35614.4 (SEQ ID NOs: 61 and 488), or a modified or unmodified variant thereof.

[1784] A RNAi agent comprising a first and a second strand, wherein the sequences of the first and/or second strands comprise the sequences of a first and/or second strand of: AD-35573.4 (SEQ ID NOs: 62 and 489), or a modified or unmodified variant thereof.

[1785] A RNAi agent comprising a first and a second strand, wherein the sequences of the first and/or second strands comprise the sequences of a first and/or second strand of: AD-35579.4 (SEQ ID NOs: 63 and 490), or a modified or unmodified variant thereof.

[1786] A RNAi agent comprising a first and a second strand, wherein the sequences of the first and/or second strands comprise the sequences of a first and/or second strand of: AD-35585.4 (SEQ ID NOs: 64 and 491), or a modified or unmodified variant thereof.

[1787] A RNAi agent comprising a first and a second strand, wherein the sequences of the first and/or second strands comprise the sequences of a first and/or second strand of: AD-35591.4 (SEQ ID NOs: 65 and 492), or a modified or unmodified variant thereof.

[1788] A RNAi agent comprising a first and a second strand, wherein the sequences of the first and/or second strands comprise the sequences of a first and/or second strand of: AD-35597.4 (SEQ ID NOs: 66 and 493), or a modified or unmodified variant thereof. A RNAi agent comprising a first and a second strand, wherein the sequences of the first and/or second strands comprise the sequences of a first and/or second strand of: AD-35603.4 (SEQ ID NOs: 67 and 494), or a modified or unmodified variant thereof.

[1789] A RNAi agent comprising a first and a second strand, wherein the sequences of the first and/or second strands comprise the sequences of a first and/or second strand of: AD-35609.4 (SEQ ID NOs: 68 and 495), or a modified or unmodified variant thereof.

[1790] A RNAi agent comprising a first and a second strand, wherein the sequences of the first and/or second strands comprise the sequences of a first and/or second strand of: AD-35615.4 (SEQ ID NOs: 69 and 496), or a modified or unmodified variant thereof.

[1791] A RNAi agent comprising a first and a second strand, wherein the sequences of the first and/or second strands comprise the sequences of a first and/or second strand of: AD-35574.4 (SEQ ID NOs: 70 and 497), or a modified or unmodified variant thereof.

[1792] A RNAi agent comprising a first and a second strand, wherein the sequences of the first and/or second strands comprise the sequences of a first and/or second strand of: AD-35580.1 (SEQ ID NOs: 71 and 498), or a modified or unmodified variant thereof.

[1793] A RNAi agent comprising a first and a second strand, wherein the sequences of the first and/or second strands comprise the sequences of a first and/or second strand of: AD-35586.4 (SEQ ID NOs: 72 and 499), or a modified or unmodified variant thereof.

[1794] A RNAi agent comprising a first and a second strand, wherein the sequences of the first and/or second strands comprise the sequences of a first and/or second strand of: AD-35592.4 (SEQ ID NOs: 73 and 500), or a modified or unmodified variant thereof.

[1795] A RNAi agent comprising a first and a second strand, wherein the sequences of the first and/or second strands comprise the sequences of a first and/or second strand of: AD-35598.4 (SEQ ID NOs: 74 and 501), or a modified or unmodified variant thereof.

[1796] A RNAi agent comprising a first and a second strand, wherein the sequences of the first and/or second strands comprise the sequences of a first and/or second strand of: AD-35604.4 (SEQ ID NOs: 75 and 502), or a modified or unmodified variant thereof.

[1797] A RNAi agent comprising a first and a second strand, wherein the sequences of the first and/or second strands comprise the sequences of a first and/or second strand of: AD-35610.4 (SEQ ID NOs: 76 and 503), or a modified or unmodified variant thereof.

[1798] A RNAi agent comprising a first and a second strand, wherein the sequences of the first and/or second strands comprise the sequences of a first and/or second strand of: AD-35616.4 (SEQ ID NOs: 77 and 504), or a modified or unmodified variant thereof.

[1799] A RNAi agent comprising a first and a second strand, wherein the sequences of the first and/or second strands comprise the sequences of a first and/or second strand of: AD-35575.4 (SEQ ID NOs: 78 and 505), or a modified or unmodified variant thereof.

[1800] A RNAi agent comprising a first and a second strand, wherein the sequences of the first and/or second strands comprise the sequences of a first and/or second strand of: AD-35581.4 (SEQ ID NOs: 79 and 506), or a modified or unmodified variant thereof.

[1801] A RNAi agent comprising a first and a second strand, wherein the sequences of the first and/or second strands comprise the sequences of a first and/or second strand of: AD-35587.4 (SEQ ID NOs: 80 and 507), or a modified or unmodified variant thereof.

[1802] A RNAi agent comprising a first and a second strand, wherein the sequences of the first and/or second strands comprise the sequences of a first and/or second strand of: AD-35593.4 (SEQ ID NOs: 81 and 508), or a modified or unmodified variant thereof.

[1803] A RNAi agent comprising a first and a second strand, wherein the sequences of the first and/or second strands comprise the sequences of a first and/or second strand of: AD-35599.4 (SEQ ID NOs: 82 and 509), or a modified or unmodified variant thereof.

[1804] A RNAi agent comprising a first and a second strand, wherein the sequences of the first and/or second strands comprise the sequences of a first and/or second strand of: AD-35605.4 (SEQ ID NOs: 83 and 510), or a modified or unmodified variant thereof.

[1805] A RNAi agent comprising a first and a second strand, wherein the sequences of the first and/or second strands comprise the sequences of a first and/or second strand of: AD-35611.4 (SEQ ID NOs: 84 and 511), or a modified or unmodified variant thereof.

[1806] A RNAi agent comprising a first and a second strand, wherein the sequences of the first and/or second strands comprise the sequences of a first and/or second strand of: AD-35617.4 (SEQ ID NOs: 85 and 512), or a modified or unmodified variant thereof.

[1807] A RNAi agent comprising a first and a second strand, wherein the sequences of the first and/or second strands comprise the sequences of a first and/or second strand of: AD-35576.4 (SEQ ID NOs: 86 and 513), or a modified or unmodified variant thereof.

[1808] A RNAi agent comprising a first and a second strand, wherein the sequences of the first and/or second strands comprise the sequences of a first and/or second strand of: AD-35588.4 (SEQ ID NOs: 87 and 514), or a modified or unmodified variant thereof.

[1809] A RNAi agent comprising a first and a second strand, wherein the sequences of the first and/or second strands comprise the sequences of a first and/or second strand of: AD-35667.1 (SEQ ID NOs: 88 and 515), or a modified or unmodified variant thereof.

[1810] A RNAi agent comprising a first and a second strand, wherein the sequences of the first and/or second strands comprise the sequences of a first and/or second strand of: AD-35673.1 (SEQ ID NOs: 89 and 516), or a modified or unmodified variant thereof.

[1811] A RNAi agent comprising a first and a second strand, wherein the sequences of the first and/or second strands comprise the sequences of a first and/or second strand of: AD-35679.1 (SEQ ID NOs: 90 and 517), or a modified or unmodified variant thereof.

[1812] A RNAi agent comprising a first and a second strand, wherein the sequences of the first and/or second strands comprise the sequences of a first and/or second strand of: AD-35685.1 (SEQ ID NOs: 91 and 518), or a modified or unmodified variant thereof.

[1813] A RNAi agent comprising a first and a second strand, wherein the sequences of the first and/or second strands comprise the sequences of a first and/or second strand of: AD-35691.1 (SEQ ID NOs: 92 and 519), or a modified or unmodified variant thereof.

[1814] A RNAi agent comprising a first and a second strand, wherein the sequences of the first and/or second strands comprise the sequences of a first and/or second strand of: AD-35557.1 (SEQ ID NOs: 93 and 520), or a modified or unmodified variant thereof.

[1815] A RNAi agent comprising a first and a second strand, wherein the sequences of the first and/or second strands comprise the sequences of a first and/or second strand of: AD-35618.1 (SEQ ID NOs: 94 and 521), or a modified or unmodified variant thereof.

[1816] A RNAi agent comprising a first and a second strand, wherein the sequences of the first and/or second strands comprise the sequences of a first and/or second strand of: AD-35569.1 (SEQ ID NOs: 95 and 522), or a modified or unmodified variant thereof.

[1817] A RNAi agent comprising a first and a second strand, wherein the sequences of the first and/or second strands comprise the sequences of a first and/or second strand of: AD-35534.1 (SEQ ID NOs: 96 and 523), or a modified or unmodified variant thereof.

[1818] A RNAi agent comprising a first and a second strand, wherein the sequences of the first and/or second strands comprise the sequences of a first and/or second strand of: AD-35582.1 (SEQ ID NOs: 97 and 524), or a modified or unmodified variant thereof.

[1819] A RNAi agent comprising a first and a second strand, wherein the sequences of the first and/or second strands comprise the sequences of a first and/or second strand of: AD-35594.1 (SEQ ID NOs: 98 and 525), or a modified or unmodified variant thereof.

[1820] A RNAi agent comprising a first and a second strand, wherein the sequences of the first and/or second strands comprise the sequences of a first and/or second strand of: AD-35600.1 (SEQ ID NOs: 99 and 526), or a modified or unmodified variant thereof.

[1821] A RNAi agent comprising a first and a second strand, wherein the sequences of the first and/or second strands comprise the sequences of a first and/or second strand of: AD-35606.1 (SEQ ID NOs: 100 and 527), or a modified or unmodified variant thereof.

[1822] A RNAi agent comprising a first and a second strand, wherein the sequences of the first and/or second strands comprise the sequences of a first and/or second strand of: AD-35612.1 (SEQ ID NOs: 101 and 528), or a modified or unmodified variant thereof.

[1823] A RNAi agent comprising a first and a second strand, wherein the sequences of the first and/or second strands comprise the sequences of a first and/or second strand of: AD-38127.1 (SEQ ID NOs: 102 and 529), or a modified or unmodified variant thereof.

[1824] A RNAi agent comprising a first and a second strand, wherein the sequences of the first and/or second strands comprise the sequences of a first and/or second strand of: AD-38133.1 (SEQ ID NOs: 103 and 530), or a modified or unmodified variant thereof.

[1825] A RNAi agent comprising a first and a second strand, wherein the sequences of the first and/or second strands comprise the sequences of a first and/or second strand of: AD-38139.1 (SEQ ID NOs: 104 and 531), or a modified or unmodified variant thereof.

[1826] A RNAi agent comprising a first and a second strand, wherein the sequences of the first and/or second strands comprise the sequences of a first and/or second strand of: AD-38145.1 (SEQ ID NOs: 105 and 532), or a modified or unmodified variant thereof.

[1827] A RNAi agent comprising a first and a second strand, wherein the sequences of the first and/or second strands comprise the sequences of a first and/or second strand of: AD-38151.1 (SEQ ID NOs: 106 and 533), or a modified or unmodified variant thereof. A RNAi agent comprising a first and a second strand, wherein the sequences of the first and/or second strands comprise the sequences of a first and/or second strand of: AD-38157.1 (SEQ ID NOs: 107 and 534), or a modified or unmodified variant thereof.

[1828] A RNAi agent comprising a first and a second strand, wherein the sequences of the first and/or second strands comprise the sequences of a first and/or second strand of: AD-38163.1 (SEQ ID NOs: 108 and 535), or a modified or unmodified variant thereof.

[1829] A RNAi agent comprising a first and a second strand, wherein the sequences of the first and/or second strands comprise the sequences of a first and/or second strand of: AD-38169.1 (SEQ ID NOs: 109 and 536), or a modified or unmodified variant thereof.

[1830] A RNAi agent comprising a first and a second strand, wherein the sequences of the first and/or second strands comprise the sequences of a first and/or second strand of: AD-38128.1 (SEQ ID NOs: 110 and 537), or a modified or unmodified variant thereof.

[1831] A RNAi agent comprising a first and a second strand, wherein the sequences of the first and/or second strands comprise the sequences of a first and/or second strand of: AD-38134.1 (SEQ ID NOs: 111 and 538), or a modified or unmodified variant thereof.

[1832] A RNAi agent comprising a first and a second strand, wherein the sequences of the first and/or second strands comprise the sequences of a first and/or second strand of: AD-38140.1 (SEQ ID NOs: 112 and 539), or a modified or unmodified variant thereof.

[1833] A RNAi agent comprising a first and a second strand, wherein the sequences of the first and/or second strands comprise the sequences of a first and/or second strand of: AD-38146.1 (SEQ ID NOs: 113 and 540), or a modified or unmodified variant thereof.

[1834] A RNAi agent comprising a first and a second strand, wherein the sequences of the first and/or second strands comprise the sequences of a first and/or second strand of: AD-38152.1 (SEQ ID NOs: 114 and 541), or a modified or unmodified variant thereof.

[1835] A RNAi agent comprising a first and a second strand, wherein the sequences of the first and/or second strands comprise the sequences of a first and/or second strand of: AD-38158.1 (SEQ ID NOs: 115 and 542), or a modified or unmodified variant thereof.

[1836] A RNAi agent comprising a first and a second strand, wherein the sequences of the first and/or second strands comprise the sequences of a first and/or second strand of: AD-38164.1 (SEQ ID NOs: 116 and 543), or a modified or unmodified variant thereof.

[1837] A RNAi agent comprising a first and a second strand, wherein the sequences of the first and/or second strands comprise the sequences of a first and/or second strand of: AD-38170.1 (SEQ ID NOs: 117 and 544), or a modified or unmodified variant thereof.

[1838] A RNAi agent comprising a first and a second strand, wherein the sequences of the first and/or second strands comprise the sequences of a first and/or second strand of: AD-38129.1 (SEQ ID NOs: 118 and 545), or a modified or unmodified variant thereof.

[1839] A RNAi agent comprising a first and a second strand, wherein the sequences of the first and/or second strands comprise the sequences of a first and/or second strand of: AD-38135.1 (SEQ ID NOs: 119 and 546), or a modified or unmodified variant thereof.

[1840] A RNAi agent comprising a first and a second strand, wherein the sequences of the first and/or second strands comprise the sequences of a first and/or second strand of: AD-38141.1 (SEQ ID NOs: 120 and 547), or a modified or unmodified variant thereof.

[1841] A RNAi agent comprising a first and a second strand, wherein the sequences of the first and/or second strands comprise the sequences of a first and/or second strand of: AD-38147.1 (SEQ ID NOs: 121 and 548), or a modified or unmodified variant thereof.

[1842] A RNAi agent comprising a first and a second strand, wherein the sequences of the first and/or second strands comprise the sequences of a first and/or second strand of: AD-38153.1 (SEQ ID NOs: 122 and 549), or a modified or unmodified variant thereof.

[1843] A RNAi agent comprising a first and a second strand, wherein the sequences of the first and/or second strands comprise the sequences of a first and/or second strand of: AD-38159.1 (SEQ ID NOs: 123 and 550), or a modified or unmodified variant thereof.

[1844] A RNAi agent comprising a first and a second strand, wherein the sequences of the first and/or second strands comprise the sequences of a first and/or second strand of: AD-38165.1 (SEQ ID NOs: 124 and 551), or a modified or unmodified variant thereof.

[1845] A RNAi agent comprising a first and a second strand, wherein the sequences of the first and/or second strands comprise the sequences of a first and/or second strand of: AD-38171.1 (SEQ ID NOs: 125 and 552), or a modified or unmodified variant thereof.

[1846] A RNAi agent comprising a first and a second strand, wherein the sequences of the first and/or second strands comprise the sequences of a first and/or second strand of: AD-38130.1 (SEQ ID NOs: 126 and 553), or a modified or unmodified variant thereof.

[1847] A RNAi agent comprising a first and a second strand, wherein the sequences of the first and/or second strands comprise the sequences of a first and/or second strand of: AD-38136.1 (SEQ ID NOs: 127 and 554), or a modified or unmodified variant thereof.

[1848] A RNAi agent comprising a first and a second strand, wherein the sequences of the first and/or second strands comprise the sequences of a first and/or second strand of: AD-38142.1 (SEQ ID NOs: 128 and 555), or a modified or unmodified variant thereof.

[1849] A RNAi agent comprising a first and a second strand, wherein the sequences of the first and/or second strands comprise the sequences of a first and/or second strand of: AD-38148.1 (SEQ ID NOs: 129 and 556), or a modified or unmodified variant thereof.

[1850] A RNAi agent comprising a first and a second strand, wherein the sequences of the first and/or second strands comprise the sequences of a first and/or second strand of: AD-38154.1 (SEQ ID NOs: 130 and 557), or a modified or unmodified variant thereof.

[1851] A RNAi agent comprising a first and a second strand, wherein the sequences of the first and/or second strands comprise the sequences of a first and/or second strand of: AD-38160.1 (SEQ ID NOs: 131 and 558), or a modified or unmodified variant thereof.

[1852] A RNAi agent comprising a first and a second strand, wherein the sequences of the first and/or second strands comprise the sequences of a first and/or second strand of: AD-38166.1 (SEQ ID NOs: 132 and 559), or a modified or unmodified variant thereof.

[1853] A RNAi agent comprising a first and a second strand, wherein the sequences of the first and/or second strands comprise the sequences of a first and/or second strand of: AD-38172.1 (SEQ ID NOs: 133 and 560), or a modified or unmodified variant thereof.

[1854] A RNAi agent comprising a first and a second strand, wherein the sequences of the first and/or second strands comprise the sequences of a first and/or second strand of: AD-38131.1 (SEQ ID NOs: 134 and 561), or a modified or unmodified variant thereof.

[1855] A RNAi agent comprising a first and a second strand, wherein the sequences of the first and/or second strands comprise the sequences of a first and/or second strand of: AD-38137.1 (SEQ ID NOs: 135 and 562), or a modified or unmodified variant thereof.

[1856] A RNAi agent comprising a first and a second strand, wherein the sequences of the first and/or second strands comprise the sequences of a first and/or second strand of: AD-38143.1 (SEQ ID NOs: 136 and 563), or a modified or unmodified variant thereof.

[1857] A RNAi agent comprising a first and a second strand, wherein the sequences of the first and/or second strands comprise the sequences of a first and/or second strand of: AD-38149.1 (SEQ ID NOs: 137 and 564), or a modified or unmodified variant thereof.

[1858] A RNAi agent comprising a first and a second strand, wherein the sequences of the first and/or second strands comprise the sequences of a first and/or second strand of: AD-38155.1 (SEQ ID NOs: 138 and 565), or a modified or unmodified variant thereof.

[1859] A RNAi agent comprising a first and a second strand, wherein the sequences of the first and/or second strands comprise the sequences of a first and/or second strand of: AD-38161.1 (SEQ ID NOs: 139 and 566), or a modified or unmodified variant thereof.

[1860] A RNAi agent comprising a first and a second strand, wherein the sequences of the first and/or second strands comprise the sequences of a first and/or second strand of: AD-38167.1 (SEQ ID NOs: 140 and 567), or a modified or unmodified variant thereof.

[1861] A RNAi agent comprising a first and a second strand, wherein the sequences of the first and/or second strands comprise the sequences of a first and/or second strand of: AD-38173.1 (SEQ ID NOs: 141 and 568), or a modified or unmodified variant thereof.

[1862] A RNAi agent comprising a first and a second strand, wherein the sequences of the first and/or second strands comprise the sequences of a first and/or second strand of: AD-38132.1 (SEQ ID NOs: 142 and 569), or a modified or unmodified variant thereof.

[1863] A RNAi agent comprising a first and a second strand, wherein the sequences of the first and/or second strands comprise the sequences of a first and/or second strand of: AD-38138.1 (SEQ ID NOs: 143 and 570), or a modified or unmodified variant thereof.

[1864] A RNAi agent comprising a first and a second strand, wherein the sequences of the first and/or second strands comprise the sequences of a first and/or second strand of: AD-38144.1 (SEQ ID NOs: 144 and 571), or a modified or unmodified variant thereof.

[1865] A RNAi agent comprising a first and a second strand, wherein the sequences of the first and/or second strands comprise the sequences of a first and/or second strand of: AD-38150.1 (SEQ ID NOs: 145 and 572), or a modified or unmodified variant thereof.

[1866] A RNAi agent comprising a first and a second strand, wherein the sequences of the first and/or second strands comprise the sequences of a first and/or second strand of: AD-38156.1 (SEQ ID NOs: 146 and 573), or a modified or unmodified variant thereof. A RNAi agent comprising a first and a second strand, wherein the sequences of the first and/or second strands comprise the sequences of a first and/or second strand of: AD-38162.1 (SEQ ID NOs: 147 and 574), or a modified or unmodified variant thereof.

[1867] A RNAi agent comprising a first and a second strand, wherein the sequences of the first and/or second strands comprise the sequences of a first and/or second strand of: AD-38168.1 (SEQ ID NOs: 148 and 575), or a modified or unmodified variant thereof.

[1868] A RNAi agent comprising a first and a second strand, wherein the sequences of the first and/or second strands comprise the sequences of a first and/or second strand of: AD-38174.1 (SEQ ID NOs: 149 and 576), or a modified or unmodified variant thereof.

[1869] A RNAi agent comprising a first and a second strand, wherein the sequences of the first and/or second strands comprise the sequences of a first and/or second strand of: AD-39683.1 (SEQ ID NOs: 150 and 577), or a modified or unmodified variant thereof.

[1870] A RNAi agent comprising a first and a second strand, wherein the sequences of the first and/or second strands comprise the sequences of a first and/or second strand of: AD-39689.1 (SEQ ID NOs: 151 and 578), or a modified or unmodified variant thereof.

[1871] A RNAi agent comprising a first and a second strand, wherein the sequences of the first and/or second strands comprise the sequences of a first and/or second strand of: AD-39695.1 (SEQ ID NOs: 152 and 579), or a modified or unmodified variant thereof.

[1872] A RNAi agent comprising a first and a second strand, wherein the sequences of the first and/or second strands comprise the sequences of a first and/or second strand of: AD-39701.1 (SEQ ID NOs: 153 and 580), or a modified or unmodified variant thereof.

[1873] A RNAi agent comprising a first and a second strand, wherein the sequences of the first and/or second strands comprise the sequences of a first and/or second strand of: AD-39707.1 (SEQ ID NOs: 154 and 581), or a modified or unmodified variant thereof.

[1874] A RNAi agent comprising a first and a second strand, wherein the sequences of the first and/or second strands comprise the sequences of a first and/or second strand of: AD-39713.1 (SEQ ID NOs: 155 and 582), or a modified or unmodified variant thereof.

[1875] A RNAi agent comprising a first and a second strand, wherein the sequences of the first and/or second strands comprise the sequences of a first and/or second strand of: AD-39719.1 (SEQ ID NOs: 156 and 583), or a modified or unmodified variant thereof.

[1876] A RNAi agent comprising a first and a second strand, wherein the sequences of the first and/or second strands comprise the sequences of a first and/or second strand of: AD-39725.1 (SEQ ID NOs: 157 and 584), or a modified or unmodified variant thereof.

[1877] A RNAi agent comprising a first and a second strand, wherein the sequences of the first and/or second strands comprise the sequences of a first and/or second strand of: AD-39684.1 (SEQ ID NOs: 158 and 585), or a modified or unmodified variant thereof.

[1878] A RNAi agent comprising a first and a second strand, wherein the sequences of the first and/or second strands comprise the sequences of a first and/or second strand of: AD-39690.1 (SEQ ID NOs: 159 and 586), or a modified or unmodified variant thereof.

[1879] A RNAi agent comprising a first and a second strand, wherein the sequences of the first and/or second strands comprise the sequences of a first and/or second strand of: AD-39696.1 (SEQ ID NOs: 160 and 587), or a modified or unmodified variant thereof.

[1880] A RNAi agent comprising a first and a second strand, wherein the sequences of the first and/or second strands comprise the sequences of a first and/or second strand of: AD-39702.1 (SEQ ID NOs: 161 and 588), or a modified or unmodified variant thereof.

[1881] A RNAi agent comprising a first and a second strand, wherein the sequences of the first and/or second strands comprise the sequences of a first and/or second strand of: AD-39708.1 (SEQ ID NOs: 162 and 589), or a modified or unmodified variant thereof.

[1882] A RNAi agent comprising a first and a second strand, wherein the sequences of the first and/or second strands comprise the sequences of a first and/or second strand of: AD-39714.1 (SEQ ID NOs: 163 and 590), or a modified or unmodified variant thereof.

[1883] A RNAi agent comprising a first and a second strand, wherein the sequences of the first and/or second strands comprise the sequences of a first and/or second strand of: AD-39720.1 (SEQ ID NOs: 164 and 591), or a modified or unmodified variant thereof.

[1884] A RNAi agent comprising a first and a second strand, wherein the sequences of the first and/or second strands comprise the sequences of a first and/or second strand of: AD-39726.1 (SEQ ID NOs: 165 and 592), or a modified or unmodified variant thereof.

[1885] A RNAi agent comprising a first and a second strand, wherein the sequences of the first and/or second strands comprise the sequences of a first and/or second strand of: AD-39685.1 (SEQ ID NOs: 166 and 593), or a modified or unmodified variant thereof.

[1886] A RNAi agent comprising a first and a second strand, wherein the sequences of the first and/or second strands comprise the sequences of a first and/or second strand of: AD-39691.1 (SEQ ID NOs: 167 and 594), or a modified or unmodified variant thereof.

[1887] A RNAi agent comprising a first and a second strand, wherein the sequences of the first and/or second strands comprise the sequences of a first and/or second strand of: AD-39697.1 (SEQ ID NOs: 168 and 595), or a modified or unmodified variant thereof.

[1888] A RNAi agent comprising a first and a second strand, wherein the sequences of the first and/or second strands comprise the sequences of a first and/or second strand of: AD-39703.1 (SEQ ID NOs: 169 and 596), or a modified or unmodified variant thereof.

[1889] A RNAi agent comprising a first and a second strand, wherein the sequences of the first and/or second strands comprise the sequences of a first and/or second strand of: AD-39709.1 (SEQ ID NOs: 170 and 597), or a modified or unmodified variant thereof.

[1890] A RNAi agent comprising a first and a second strand, wherein the sequences of the first and/or second strands comprise the sequences of a first and/or second strand of: AD-39715.1 (SEQ ID NOs: 171 and 598), or a modified or unmodified variant thereof.

[1891] A RNAi agent comprising a first and a second strand, wherein the sequences of the first and/or second strands comprise the sequences of a first and/or second strand of: AD-39721.1 (SEQ ID NOs: 172 and 599), or a modified or unmodified variant thereof.

[1892] A RNAi agent comprising a first and a second strand, wherein the sequences of the first and/or second strands comprise the sequences of a first and/or second strand of: AD-39727.1 (SEQ ID NOs: 173 and 600), or a modified or unmodified variant thereof.

[1893] A RNAi agent comprising a first and a second strand, wherein the sequences of the first and/or second strands comprise the sequences of a first and/or second strand of: AD-39686.1 (SEQ ID NOs: 174 and 601), or a modified or unmodified variant thereof.

[1894] A RNAi agent comprising a first and a second strand, wherein the sequences of the first and/or second strands comprise the sequences of a first and/or second strand of: AD-39692.1 (SEQ ID NOs: 175 and 602), or a modified or unmodified variant thereof.

[1895] A RNAi agent comprising a first and a second strand, wherein the sequences of the first and/or second strands comprise the sequences of a first and/or second strand of: AD-39698.1 (SEQ ID NOs: 176 and 603), or a modified or unmodified variant thereof.

[1896] A RNAi agent comprising a first and a second strand, wherein the sequences of the first and/or second strands comprise the sequences of a first and/or second strand of: AD-39704.1 (SEQ ID NOs: 177 and 604), or a modified or unmodified variant thereof.

[1897] A RNAi agent comprising a first and a second strand, wherein the sequences of the first and/or second strands comprise the sequences of a first and/or second strand of: AD-39710.1 (SEQ ID NOs: 178 and 605), or a modified or unmodified variant thereof.

[1898] A RNAi agent comprising a first and a second strand, wherein the sequences of the first and/or second strands comprise the sequences of a first and/or second strand of: AD-39716.1 (SEQ ID NOs: 179 and 606), or a modified or unmodified variant thereof.

[1899] A RNAi agent comprising a first and a second strand, wherein the sequences of the first and/or second strands comprise the sequences of a first and/or second strand of: AD-39722.1 (SEQ ID NOs: 180 and 607), or a modified or unmodified variant thereof.

[1900] A RNAi agent comprising a first and a second strand, wherein the sequences of the first and/or second strands comprise the sequences of a first and/or second strand of: AD-39728.1 (SEQ ID NOs: 181 and 608), or a modified or unmodified variant thereof.

[1901] A RNAi agent comprising a first and a second strand, wherein the sequences of the first and/or second strands comprise the sequences of a first and/or second strand of: AD-39687.1 (SEQ ID NOs: 182 and 609), or a modified or unmodified variant thereof.

[1902] A RNAi agent comprising a first and a second strand, wherein the sequences of the first and/or second strands comprise the sequences of a first and/or second strand of: AD-39693.1 (SEQ ID NOs: 183 and 610), or a modified or unmodified variant thereof.

[1903] A RNAi agent comprising a first and a second strand, wherein the sequences of the first and/or second strands comprise the sequences of a first and/or second strand of: AD-39699.1 (SEQ ID NOs: 184 and 611), or a modified or unmodified variant thereof.

[1904] A RNAi agent comprising a first and a second strand, wherein the sequences of the first and/or second strands comprise the sequences of a first and/or second strand of: AD-39705.1 (SEQ ID NOs: 185 and 612), or a modified or unmodified variant thereof.

[1905] A RNAi agent comprising a first and a second strand, wherein the sequences of the first and/or second strands comprise the sequences of a first and/or second strand of: AD-39711.1 (SEQ ID NOs: 186 and 613), or a modified or unmodified variant thereof. A RNAi agent comprising a first and a second strand, wherein the sequences of the first and/or second strands comprise the sequences of a first and/or second strand of: AD-39717.1 (SEQ ID NOs: 187 and 614), or a modified or unmodified variant thereof.

[1906] A RNAi agent comprising a first and a second strand, wherein the sequences of the first and/or second strands comprise the sequences of a first and/or second strand of: AD-39723.1 (SEQ ID NOs: 188 and 615), or a modified or unmodified variant thereof.

[1907] A RNAi agent comprising a first and a second strand, wherein the sequences of the first and/or second strands comprise the sequences of a first and/or second strand of: AD-39729.1 (SEQ ID NOs: 189 and 616), or a modified or unmodified variant thereof.

[1908] A RNAi agent comprising a first and a second strand, wherein the sequences of the first and/or second strands comprise the sequences of a first and/or second strand of: AD-39688.1 (SEQ ID NOs: 190 and 617), or a modified or unmodified variant thereof.

[1909] A RNAi agent comprising a first and a second strand, wherein the sequences of the first and/or second strands comprise the sequences of a first and/or second strand of: AD-39694.1 (SEQ ID NOs: 191 and 618), or a modified or unmodified variant thereof.

[1910] A RNAi agent comprising a first and a second strand, wherein the sequences of the first and/or second strands comprise the sequences of a first and/or second strand of: AD-39700.1 (SEQ ID NOs: 192 and 619), or a modified or unmodified variant thereof.

[1911] A RNAi agent comprising a first and a second strand, wherein the sequences of the first and/or second strands comprise the sequences of a first and/or second strand of: AD-39706.1 (SEQ ID NOs: 193 and 620), or a modified or unmodified variant thereof.

[1912] A RNAi agent comprising a first and a second strand, wherein the sequences of the first and/or second strands comprise the sequences of a first and/or second strand of: AD-39712.1 (SEQ ID NOs: 194 and 621), or a modified or unmodified variant thereof.

[1913] A RNAi agent comprising a first and a second strand, wherein the sequences of the first and/or second strands comprise the sequences of a first and/or second strand of: AD-39718.1 (SEQ ID NOs: 195 and 622), or a modified or unmodified variant thereof.

[1914] A RNAi agent comprising a first and a second strand, wherein the sequences of the first and/or second strands comprise the sequences of a first and/or second strand of: AD-39724.1 (SEQ ID NOs: 196 and 623), or a modified or unmodified variant thereof.

[1915] A RNAi agent comprising a first and a second strand, wherein the sequences of the first and/or second strands comprise the sequences of a first and/or second strand of: AD-39730.1 (SEQ ID NOs: 197 and 624), or a modified or unmodified variant thereof.

[1916] A RNAi agent comprising a first and a second strand, wherein the sequences of the first and/or second strands comprise the sequences of a first and/or second strand of: AD-39736.1 (SEQ ID NOs: 198 and 625), or a modified or unmodified variant thereof.

[1917] A RNAi agent comprising a first and a second strand, wherein the sequences of the first and/or second strands comprise the sequences of a first and/or second strand of: AD-39742.1 (SEQ ID NOs: 199 and 626), or a modified or unmodified variant thereof.

[1918] A RNAi agent comprising a first and a second strand, wherein the sequences of the first and/or second strands comprise the sequences of a first and/or second strand of: AD-39748.1 (SEQ ID NOs: 200 and 627), or a modified or unmodified variant thereof.

[1919] A RNAi agent comprising a first and a second strand, wherein the sequences of the first and/or second strands comprise the sequences of a first and/or second strand of: AD-39754.1 (SEQ ID NOs: 201 and 628), or a modified or unmodified variant thereof.

[1920] A RNAi agent comprising a first and a second strand, wherein the sequences of the first and/or second strands comprise the sequences of a first and/or second strand of: AD-39760.1 (SEQ ID NOs: 202 and 629), or a modified or unmodified variant thereof.

[1921] A RNAi agent comprising a first and a second strand, wherein the sequences of the first and/or second strands comprise the sequences of a first and/or second strand of: AD-39766.1 (SEQ ID NOs: 203 and 630), or a modified or unmodified variant thereof.

[1922] A RNAi agent comprising a first and a second strand, wherein the sequences of the first and/or second strands comprise the sequences of a first and/or second strand of: AD-39772.1 (SEQ ID NOs: 204 and 631), or a modified or unmodified variant thereof.

[1923] A RNAi agent comprising a first and a second strand, wherein the sequences of the first and/or second strands comprise the sequences of a first and/or second strand of: AD-39731.1 (SEQ ID NOs: 205 and 632), or a modified or unmodified variant thereof.

[1924] A RNAi agent comprising a first and a second strand, wherein the sequences of the first and/or second strands comprise the sequences of a first and/or second strand of: AD-39737.1 (SEQ ID NOs: 206 and 633), or a modified or unmodified variant thereof.

[1925] A RNAi agent comprising a first and a second strand, wherein the sequences of the first and/or second strands comprise the sequences of a first and/or second strand of: AD-39743.1 (SEQ ID NOs: 207 and 634), or a modified or unmodified variant thereof.

[1926] A RNAi agent comprising a first and a second strand, wherein the sequences of the first and/or second strands comprise the sequences of a first and/or second strand of: AD-39749.1 (SEQ ID NOs: 208 and 635), or a modified or unmodified variant thereof.

[1927] A RNAi agent comprising a first and a second strand, wherein the sequences of the first and/or second strands comprise the sequences of a first and/or second strand of: AD-39755.1 (SEQ ID NOs: 209 and 636), or a modified or unmodified variant thereof.

[1928] A RNAi agent comprising a first and a second strand, wherein the sequences of the first and/or second strands comprise the sequences of a first and/or second strand of: AD-39761.1 (SEQ ID NOs: 210 and 637), or a modified or unmodified variant thereof.

[1929] A RNAi agent comprising a first and a second strand, wherein the sequences of the first and/or second strands comprise the sequences of a first and/or second strand of: AD-39767.1 (SEQ ID NOs: 211 and 638), or a modified or unmodified variant thereof.

[1930] A RNAi agent comprising a first and a second strand, wherein the sequences of the first and/or second strands comprise the sequences of a first and/or second strand of: AD-39773.1 (SEQ ID NOs: 212 and 639), or a modified or unmodified variant thereof.

[1931] A RNAi agent comprising a first and a second strand, wherein the sequences of the first and/or second strands comprise the sequences of a first and/or second strand of: AD-39732.1 (SEQ ID NOs: 213 and 640), or a modified or unmodified variant thereof.

[1932] A RNAi agent comprising a first and a second strand, wherein the sequences of the first and/or second strands comprise the sequences of a first and/or second strand of: AD-39738.1 (SEQ ID NOs: 214 and 641), or a modified or unmodified variant thereof.

[1933] A RNAi agent comprising a first and a second strand, wherein the sequences of the first and/or second strands comprise the sequences of a first and/or second strand of: AD-39744.1 (SEQ ID NOs: 215 and 642), or a modified or unmodified variant thereof.

[1934] A RNAi agent comprising a first and a second strand, wherein the sequences of the first and/or second strands comprise the sequences of a first and/or second strand of: AD-39750.1 (SEQ ID NOs: 216 and 643), or a modified or unmodified variant thereof.

[1935] A RNAi agent comprising a first and a second strand, wherein the sequences of the first and/or second strands comprise the sequences of a first and/or second strand of: AD-39756.1 (SEQ ID NOs: 217 and 644), or a modified or unmodified variant thereof.

[1936] A RNAi agent comprising a first and a second strand, wherein the sequences of the first and/or second strands comprise the sequences of a first and/or second strand of: AD-39762.1 (SEQ ID NOs: 218 and 645), or a modified or unmodified variant thereof.

[1937] A RNAi agent comprising a first and a second strand, wherein the sequences of the first and/or second strands comprise the sequences of a first and/or second strand of: AD-39768.1 (SEQ ID NOs: 219 and 646), or a modified or unmodified variant thereof.

[1938] A RNAi agent comprising a first and a second strand, wherein the sequences of the first and/or second strands comprise the sequences of a first and/or second strand of: AD-39774.1 (SEQ ID NOs: 220 and 647), or a modified or unmodified variant thereof.

[1939] A RNAi agent comprising a first and a second strand, wherein the sequences of the first and/or second strands comprise the sequences of a first and/or second strand of: AD-39733.1 (SEQ ID NOs: 221 and 648), or a modified or unmodified variant thereof.

[1940] A RNAi agent comprising a first and a second strand, wherein the sequences of the first and/or second strands comprise the sequences of a first and/or second strand of: AD-39739.1 (SEQ ID NOs: 222 and 649), or a modified or unmodified variant thereof.

[1941] A RNAi agent comprising a first and a second strand, wherein the sequences of the first and/or second strands comprise the sequences of a first and/or second strand of: AD-39745.1 (SEQ ID NOs: 223 and 650), or a modified or unmodified variant thereof.

[1942] A RNAi agent comprising a first and a second strand, wherein the sequences of the first and/or second strands comprise the sequences of a first and/or second strand of: AD-39751.1 (SEQ ID NOs: 224 and 651), or a modified or unmodified variant thereof.

[1943] A RNAi agent comprising a first and a second strand, wherein the sequences of the first and/or second strands comprise the sequences of a first and/or second strand of: AD-39757.1 (SEQ ID NOs: 225 and 652), or a modified or unmodified variant thereof.

[1944] A RNAi agent comprising a first and a second strand, wherein the sequences of the first and/or second strands comprise the sequences of a first and/or second strand of: AD-39763.1 (SEQ ID NOs: 226 and 653), or a modified or unmodified variant thereof. A RNAi agent comprising a first and a second strand, wherein the sequences of the first and/or second strands comprise the sequences of a first and/or second strand of: AD-39769.1 (SEQ ID NOs: 227 and 654), or a modified or unmodified variant thereof.

[1945] A RNAi agent comprising a first and a second strand, wherein the sequences of the first and/or second strands comprise the sequences of a first and/or second strand of: AD-39775.1 (SEQ ID NOs: 228 and 655), or a modified or unmodified variant thereof.

[1946] A RNAi agent comprising a first and a second strand, wherein the sequences of the first and/or second strands comprise the sequences of a first and/or second strand of: AD-39734.1 (SEQ ID NOs: 229 and 656), or a modified or unmodified variant thereof.

[1947] A RNAi agent comprising a first and a second strand, wherein the sequences of the first and/or second strands comprise the sequences of a first and/or second strand of: AD-39740.1 (SEQ ID NOs: 230 and 657), or a modified or unmodified variant thereof.

[1948] A RNAi agent comprising a first and a second strand, wherein the sequences of the first and/or second strands comprise the sequences of a first and/or second strand of: AD-39746.1 (SEQ ID NOs: 231 and 658), or a modified or unmodified variant thereof.

[1949] A RNAi agent comprising a first and a second strand, wherein the sequences of the first and/or second strands comprise the sequences of a first and/or second strand of: AD-39752.1 (SEQ ID NOs: 232 and 659), or a modified or unmodified variant thereof.

[1950] A RNAi agent comprising a first and a second strand, wherein the sequences of the first and/or second strands comprise the sequences of a first and/or second strand of: AD-39758.1 (SEQ ID NOs: 233 and 660), or a modified or unmodified variant thereof.

[1951] A RNAi agent comprising a first and a second strand, wherein the sequences of the first and/or second strands comprise the sequences of a first and/or second strand of: AD-39764.1 (SEQ ID NOs: 234 and 661), or a modified or unmodified variant thereof.

[1952] A RNAi agent comprising a first and a second strand, wherein the sequences of the first and/or second strands comprise the sequences of a first and/or second strand of: AD-39770.1 (SEQ ID NOs: 235 and 662), or a modified or unmodified variant thereof.

[1953] A RNAi agent comprising a first and a second strand, wherein the sequences of the first and/or second strands comprise the sequences of a first and/or second strand of: AD-39776.1 (SEQ ID NOs: 236 and 663), or a modified or unmodified variant thereof.

[1954] A RNAi agent comprising a first and a second strand, wherein the sequences of the first and/or second strands comprise the sequences of a first and/or second strand of: AD-39735.1 (SEQ ID NOs: 237 and 664), or a modified or unmodified variant thereof.

[1955] A RNAi agent comprising a first and a second strand, wherein the sequences of the first and/or second strands comprise the sequences of a first and/or second strand of: AD-39741.1 (SEQ ID NOs: 238 and 665), or a modified or unmodified variant thereof.

[1956] A RNAi agent comprising a first and a second strand, wherein the sequences of the first and/or second strands comprise the sequences of a first and/or second strand of: AD-39747.1 (SEQ ID NOs: 239 and 666), or a modified or unmodified variant thereof.

[1957] A RNAi agent comprising a first and a second strand, wherein the sequences of the first and/or second strands comprise the sequences of a first and/or second strand of: AD-39753.1 (SEQ ID NOs: 240 and 667), or a modified or unmodified variant thereof.

[1958] A RNAi agent comprising a first and a second strand, wherein the sequences of the first and/or second strands comprise the sequences of a first and/or second strand of: AD-39759.1 (SEQ ID NOs: 241 and 668), or a modified or unmodified variant thereof.

[1959] A RNAi agent comprising a first and a second strand, wherein the sequences of the first and/or second strands comprise the sequences of a first and/or second strand of: AD-39765.1 (SEQ ID NOs: 242 and 669), or a modified or unmodified variant thereof.

[1960] A RNAi agent comprising a first and a second strand, wherein the sequences of the first and/or second strands comprise the sequences of a first and/or second strand of: AD-39771.1 (SEQ ID NOs: 243 and 670), or a modified or unmodified variant thereof.

[1961] A RNAi agent comprising a first and a second strand, wherein the sequences of the first and/or second strands comprise the sequences of a first and/or second strand of: AD-39778.1 (SEQ ID NOs: 244 and 671), or a modified or unmodified variant thereof.

[1962] A RNAi agent comprising a first and a second strand, wherein the sequences of the first and/or second strands comprise the sequences of a first and/or second strand of: AD-39784.1 (SEQ ID NOs: 245 and 672), or a modified or unmodified variant thereof.

[1963] A RNAi agent comprising a first and a second strand, wherein the sequences of the first and/or second strands comprise the sequences of a first and/or second strand of: AD-39790.1 (SEQ ID NOs: 246 and 673), or a modified or unmodified variant thereof.

[1964] A RNAi agent comprising a first and a second strand, wherein the sequences of the first and/or second strands comprise the sequences of a first and/or second strand of: AD-39796.1 (SEQ ID NOs: 247 and 674), or a modified or unmodified variant thereof.

[1965] A RNAi agent comprising a first and a second strand, wherein the sequences of the first and/or second strands comprise the sequences of a first and/or second strand of: AD-39802.1 (SEQ ID NOs: 248 and 675), or a modified or unmodified variant thereof.

[1966] A RNAi agent comprising a first and a second strand, wherein the sequences of the first and/or second strands comprise the sequences of a first and/or second strand of: AD-39808.1 (SEQ ID NOs: 249 and 676), or a modified or unmodified variant thereof.

[1967] A RNAi agent comprising a first and a second strand, wherein the sequences of the first and/or second strands comprise the sequences of a first and/or second strand of: AD-39814.1 (SEQ ID NOs: 250 and 677), or a modified or unmodified variant thereof.

[1968] A RNAi agent comprising a first and a second strand, wherein the sequences of the first and/or second strands comprise the sequences of a first and/or second strand of: AD-39820.1 (SEQ ID NOs: 251 and 678), or a modified or unmodified variant thereof.

[1969] A RNAi agent comprising a first and a second strand, wherein the sequences of the first and/or second strands comprise the sequences of a first and/or second strand of: AD-39779.1 (SEQ ID NOs: 252 and 679), or a modified or unmodified variant thereof.

[1970] A RNAi agent comprising a first and a second strand, wherein the sequences of the first and/or second strands comprise the sequences of a first and/or second strand of: AD-39785.1 (SEQ ID NOs: 253 and 680), or a modified or unmodified variant thereof.

[1971] A RNAi agent comprising a first and a second strand, wherein the sequences of the first and/or second strands comprise the sequences of a first and/or second strand of: AD-39791.1 (SEQ ID NOs: 254 and 681), or a modified or unmodified variant thereof.

[1972] A RNAi agent comprising a first and a second strand, wherein the sequences of the first and/or second strands comprise the sequences of a first and/or second strand of: AD-39797.1 (SEQ ID NOs: 255 and 682), or a modified or unmodified variant thereof.

[1973] A RNAi agent comprising a first and a second strand, wherein the sequences of the first and/or second strands comprise the sequences of a first and/or second strand of: AD-39803.1 (SEQ ID NOs: 256 and 683), or a modified or unmodified variant thereof.

[1974] A RNAi agent comprising a first and a second strand, wherein the sequences of the first and/or second strands comprise the sequences of a first and/or second strand of: AD-39809.1 (SEQ ID NOs: 257 and 684), or a modified or unmodified variant thereof.

[1975] A RNAi agent comprising a first and a second strand, wherein the sequences of the first and/or second strands comprise the sequences of a first and/or second strand of: AD-39815.1 (SEQ ID NOs: 258 and 685), or a modified or unmodified variant thereof.

[1976] A RNAi agent comprising a first and a second strand, wherein the sequences of the first and/or second strands comprise the sequences of a first and/or second strand of: AD-39821.1 (SEQ ID NOs: 259 and 686), or a modified or unmodified variant thereof.

[1977] A RNAi agent comprising a first and a second strand, wherein the sequences of the first and/or second strands comprise the sequences of a first and/or second strand of: AD-39780.1 (SEQ ID NOs: 260 and 687), or a modified or unmodified variant thereof.

[1978] A RNAi agent comprising a first and a second strand, wherein the sequences of the first and/or second strands comprise the sequences of a first and/or second strand of: AD-39786.1 (SEQ ID NOs: 261 and 688), or a modified or unmodified variant thereof.

[1979] A RNAi agent comprising a first and a second strand, wherein the sequences of the first and/or second strands comprise the sequences of a first and/or second strand of: AD-39792.1 (SEQ ID NOs: 262 and 689), or a modified or unmodified variant thereof.

[1980] A RNAi agent comprising a first and a second strand, wherein the sequences of the first and/or second strands comprise the sequences of a first and/or second strand of: AD-39798.1 (SEQ ID NOs: 263 and 690), or a modified or unmodified variant thereof.

[1981] A RNAi agent comprising a first and a second strand, wherein the sequences of the first and/or second strands comprise the sequences of a first and/or second strand of: AD-39804.1 (SEQ ID NOs: 264 and 691), or a modified or unmodified variant thereof.

[1982] A RNAi agent comprising a first and a second strand, wherein the sequences of the first and/or second strands comprise the sequences of a first and/or second strand of: AD-39810.1 (SEQ ID NOs: 265 and 692), or a modified or unmodified variant thereof.

[1983] A RNAi agent comprising a first and a second strand, wherein the sequences of the first and/or second strands comprise the sequences of a first and/or second strand of: AD-39816.1 (SEQ ID NOs: 266 and 693), or a modified or unmodified variant thereof. A RNAi agent comprising a first and a second strand, wherein the sequences of the first and/or second strands comprise the sequences of a first and/or second strand of: AD-39822.1 (SEQ ID NOs: 267 and 694), or a modified or unmodified variant thereof.

[1984] A RNAi agent comprising a first and a second strand, wherein the sequences of the first and/or second strands comprise the sequences of a first and/or second strand of: AD-39781.1 (SEQ ID NOs: 268 and 695), or a modified or unmodified variant thereof.

[1985] A RNAi agent comprising a first and a second strand, wherein the sequences of the first and/or second strands comprise the sequences of a first and/or second strand of: AD-39787.1 (SEQ ID NOs: 269 and 696), or a modified or unmodified variant thereof.

[1986] A RNAi agent comprising a first and a second strand, wherein the sequences of the first and/or second strands comprise the sequences of a first and/or second strand of: AD-39793.1 (SEQ ID NOs: 270 and 697), or a modified or unmodified variant thereof.

[1987] A RNAi agent comprising a first and a second strand, wherein the sequences of the first and/or second strands comprise the sequences of a first and/or second strand of: AD-39799.1 (SEQ ID NOs: 271 and 698), or a modified or unmodified variant thereof.

[1988] A RNAi agent comprising a first and a second strand, wherein the sequences of the first and/or second strands comprise the sequences of a first and/or second strand of: AD-39805.1 (SEQ ID NOs: 272 and 699), or a modified or unmodified variant thereof.

[1989] A RNAi agent comprising a first and a second strand, wherein the sequences of the first and/or second strands comprise the sequences of a first and/or second strand of: AD-39811.1 (SEQ ID NOs: 273 and 700), or a modified or unmodified variant thereof.

[1990] A RNAi agent comprising a first and a second strand, wherein the sequences of the first and/or second strands comprise the sequences of a first and/or second strand of: AD-39817.1 (SEQ ID NOs: 274 and 701), or a modified or unmodified variant thereof.

[1991] A RNAi agent comprising a first and a second strand, wherein the sequences of the first and/or second strands comprise the sequences of a first and/or second strand of: AD-39823.1 (SEQ ID NOs: 275 and 702), or a modified or unmodified variant thereof.

[1992] A RNAi agent comprising a first and a second strand, wherein the sequences of the first and/or second strands comprise the sequences of a first and/or second strand of: AD-39782.1 (SEQ ID NOs: 276 and 703), or a modified or unmodified variant thereof.

[1993] A RNAi agent comprising a first and a second strand, wherein the sequences of the first and/or second strands comprise the sequences of a first and/or second strand of: AD-39788.1 (SEQ ID NOs: 277 and 704), or a modified or unmodified variant thereof.

[1994] A RNAi agent comprising a first and a second strand, wherein the sequences of the first and/or second strands comprise the sequences of a first and/or second strand of: AD-39794.1 (SEQ ID NOs: 278 and 705), or a modified or unmodified variant thereof.

[1995] A RNAi agent comprising a first and a second strand, wherein the sequences of the first and/or second strands comprise the sequences of a first and/or second strand of: AD-39800.1 (SEQ ID NOs: 279 and 706), or a modified or unmodified variant thereof.

[1996] A RNAi agent comprising a first and a second strand, wherein the sequences of the first and/or second strands comprise the sequences of a first and/or second strand of: AD-39806.1 (SEQ ID NOs: 280 and 707), or a modified or unmodified variant thereof.

[1997] A RNAi agent comprising a first and a second strand, wherein the sequences of the first and/or second strands comprise the sequences of a first and/or second strand of: AD-39812.1 (SEQ ID NOs: 281 and 708), or a modified or unmodified variant thereof.

[1998] A RNAi agent comprising a first and a second strand, wherein the sequences of the first and/or second strands comprise the sequences of a first and/or second strand of: AD-39818.1 (SEQ ID NOs: 282 and 709), or a modified or unmodified variant thereof.

[1999] A RNAi agent comprising a first and a second strand, wherein the sequences of the first and/or second strands comprise the sequences of a first and/or second strand of: AD-39824.1 (SEQ ID NOs: 283 and 710), or a modified or unmodified variant thereof.

[2000] A RNAi agent comprising a first and a second strand, wherein the sequences of the first and/or second strands comprise the sequences of a first and/or second strand of: AD-39783.1 (SEQ ID NOs: 284 and 711), or a modified or unmodified variant thereof.

[2001] A RNAi agent comprising a first and a second strand, wherein the sequences of the first and/or second strands comprise the sequences of a first and/or second strand of: AD-39789.1 (SEQ ID NOs: 285 and 712), or a modified or unmodified variant thereof.

[2002] A RNAi agent comprising a first and a second strand, wherein the sequences of the first and/or second strands comprise the sequences of a first and/or second strand of: AD-39795.1 (SEQ ID NOs: 286 and 713), or a modified or unmodified variant thereof.

[2003] A RNAi agent comprising a first and a second strand, wherein the sequences of the first and/or second strands comprise the sequences of a first and/or second strand of: AD-39801.1 (SEQ ID NOs: 287 and 714), or a modified or unmodified variant thereof.

[2004] A RNAi agent comprising a first and a second strand, wherein the sequences of the first and/or second strands comprise the sequences of a first and/or second strand of: AD-39807.1 (SEQ ID NOs: 288 and 715), or a modified or unmodified variant thereof.

[2005] A RNAi agent comprising a first and a second strand, wherein the sequences of the first and/or second strands comprise the sequences of a first and/or second strand of: AD-39813.1 (SEQ ID NOs: 289 and 716), or a modified or unmodified variant thereof.

[2006] A RNAi agent comprising a first and a second strand, wherein the sequences of the first and/or second strands comprise the sequences of a first and/or second strand of: AD-39819.1 (SEQ ID NOs: 290 and 717), or a modified or unmodified variant thereof.

[2007] A RNAi agent comprising a first and a second strand, wherein the sequences of the first and/or second strands comprise the sequences of a first and/or second strand of: AD-39825.1 (SEQ ID NOs: 291 and 718), or a modified or unmodified variant thereof.

[2008] A RNAi agent comprising a first and a second strand, wherein the sequences of the first and/or second strands comprise the sequences of a first and/or second strand of: AD-39831.1 (SEQ ID NOs: 292 and 719), or a modified or unmodified variant thereof.

[2009] A RNAi agent comprising a first and a second strand, wherein the sequences of the first and/or second strands comprise the sequences of a first and/or second strand of: AD-39837.1 (SEQ ID NOs: 293 and 720), or a modified or unmodified variant thereof.

[2010] A RNAi agent comprising a first and a second strand, wherein the sequences of the first and/or second strands comprise the sequences of a first and/or second strand of: AD-39843.1 (SEQ ID NOs: 294 and 721), or a modified or unmodified variant thereof.

[2011] A RNAi agent comprising a first and a second strand, wherein the sequences of the first and/or second strands comprise the sequences of a first and/or second strand of: AD-39849.1 (SEQ ID NOs: 295 and 722), or a modified or unmodified variant thereof.

[2012] A RNAi agent comprising a first and a second strand, wherein the sequences of the first and/or second strands comprise the sequences of a first and/or second strand of: AD-39855.1 (SEQ ID NOs: 296 and 723), or a modified or unmodified variant thereof.

[2013] A RNAi agent comprising a first and a second strand, wherein the sequences of the first and/or second strands comprise the sequences of a first and/or second strand of: AD-39861.1 (SEQ ID NOs: 297 and 724), or a modified or unmodified variant thereof.

[2014] A RNAi agent comprising a first and a second strand, wherein the sequences of the first and/or second strands comprise the sequences of a first and/or second strand of: AD-39867.1 (SEQ ID NOs: 298 and 725), or a modified or unmodified variant thereof.

[2015] A RNAi agent comprising a first and a second strand, wherein the sequences of the first and/or second strands comprise the sequences of a first and/or second strand of: AD-39826.1 (SEQ ID NOs: 299 and 726), or a modified or unmodified variant thereof.

[2016] A RNAi agent comprising a first and a second strand, wherein the sequences of the first and/or second strands comprise the sequences of a first and/or second strand of: AD-39832.1 (SEQ ID NOs: 300 and 727), or a modified or unmodified variant thereof.

[2017] A RNAi agent comprising a first and a second strand, wherein the sequences of the first and/or second strands comprise the sequences of a first and/or second strand of: AD-39838.1 (SEQ ID NOs: 301 and 728), or a modified or unmodified variant thereof.

[2018] A RNAi agent comprising a first and a second strand, wherein the sequences of the first and/or second strands comprise the sequences of a first and/or second strand of: AD-39844.1 (SEQ ID NOs: 302 and 729), or a modified or unmodified variant thereof.

[2019] A RNAi agent comprising a first and a second strand, wherein the sequences of the first and/or second strands comprise the sequences of a first and/or second strand of: AD-39850.1 (SEQ ID NOs: 303 and 730), or a modified or unmodified variant thereof.

[2020] A RNAi agent comprising a first and a second strand, wherein the sequences of the first and/or second strands comprise the sequences of a first and/or second strand of: AD-39856.1 (SEQ ID NOs: 304 and 731), or a modified or unmodified variant thereof.

[2021] A RNAi agent comprising a first and a second strand, wherein the sequences of the first and/or second strands comprise the sequences of a first and/or second strand of: AD-39862.1 (SEQ ID NOs: 305 and 732), or a modified or unmodified variant thereof.

[2022] A RNAi agent comprising a first and a second strand, wherein the sequences of the first and/or second strands comprise the sequences of a first and/or second strand of: AD-39868.1 (SEQ ID NOs: 306 and 733), or a modified or unmodified variant thereof. A RNAi agent comprising a first and a second strand, wherein the sequences of the first and/or second strands comprise the sequences of a first and/or second strand of: AD-39827.1 (SEQ ID NOs: 307 and 734), or a modified or unmodified variant thereof.

[2023] A RNAi agent comprising a first and a second strand, wherein the sequences of the first and/or second strands comprise the sequences of a first and/or second strand of: AD-39833.1 (SEQ ID NOs: 308 and 735), or a modified or unmodified variant thereof.

[2024] A RNAi agent comprising a first and a second strand, wherein the sequences of the first and/or second strands comprise the sequences of a first and/or second strand of: AD-39839.1 (SEQ ID NOs: 309 and 736), or a modified or unmodified variant thereof.

[2025] A RNAi agent comprising a first and a second strand, wherein the sequences of the first and/or second strands comprise the sequences of a first and/or second strand of: AD-39845.1 (SEQ ID NOs: 310 and 737), or a modified or unmodified variant thereof.

[2026] A RNAi agent comprising a first and a second strand, wherein the sequences of the first and/or second strands comprise the sequences of a first and/or second strand of: AD-39851.1 (SEQ ID NOs: 311 and 738), or a modified or unmodified variant thereof.

[2027] A RNAi agent comprising a first and a second strand, wherein the sequences of the first and/or second strands comprise the sequences of a first and/or second strand of: AD-39857.1 (SEQ ID NOs: 312 and 739), or a modified or unmodified variant thereof.

[2028] A RNAi agent comprising a first and a second strand, wherein the sequences of the first and/or second strands comprise the sequences of a first and/or second strand of: AD-39863.1 (SEQ ID NOs: 313 and 740), or a modified or unmodified variant thereof.

[2029] A RNAi agent comprising a first and a second strand, wherein the sequences of the first and/or second strands comprise the sequences of a first and/or second strand of: AD-39869.1 (SEQ ID NOs: 314 and 741), or a modified or unmodified variant thereof.

[2030] A RNAi agent comprising a first and a second strand, wherein the sequences of the first and/or second strands comprise the sequences of a first and/or second strand of: AD-39828.1 (SEQ ID NOs: 315 and 742), or a modified or unmodified variant thereof.

[2031] A RNAi agent comprising a first and a second strand, wherein the sequences of the first and/or second strands comprise the sequences of a first and/or second strand of: AD-39834.1 (SEQ ID NOs: 316 and 743), or a modified or unmodified variant thereof.

[2032] A RNAi agent comprising a first and a second strand, wherein the sequences of the first and/or second strands comprise the sequences of a first and/or second strand of: AD-39840.1 (SEQ ID NOs: 317 and 744), or a modified or unmodified variant thereof.

[2033] A RNAi agent comprising a first and a second strand, wherein the sequences of the first and/or second strands comprise the sequences of a first and/or second strand of: AD-39846.1 (SEQ ID NOs: 318 and 745), or a modified or unmodified variant thereof.

[2034] A RNAi agent comprising a first and a second strand, wherein the sequences of the first and/or second strands comprise the sequences of a first and/or second strand of: AD-39852.1 (SEQ ID NOs: 319 and 746), or a modified or unmodified variant thereof.

[2035] A RNAi agent comprising a first and a second strand, wherein the sequences of the first and/or second strands comprise the sequences of a first and/or second strand of: AD-39858.1 (SEQ ID NOs: 320 and 747), or a modified or unmodified variant thereof.

[2036] A RNAi agent comprising a first and a second strand, wherein the sequences of the first and/or second strands comprise the sequences of a first and/or second strand of: AD-39864.1 (SEQ ID NOs: 321 and 748), or a modified or unmodified variant thereof.

[2037] A RNAi agent comprising a first and a second strand, wherein the sequences of the first and/or second strands comprise the sequences of a first and/or second strand of: AD-39870.1 (SEQ ID NOs: 322 and 749), or a modified or unmodified variant thereof.

[2038] A RNAi agent comprising a first and a second strand, wherein the sequences of the first and/or second strands comprise the sequences of a first and/or second strand of: AD-39829.1 (SEQ ID NOs: 323 and 750), or a modified or unmodified variant thereof.

[2039] A RNAi agent comprising a first and a second strand, wherein the sequences of the first and/or second strands comprise the sequences of a first and/or second strand of: AD-39835.1 (SEQ ID NOs: 324 and 751), or a modified or unmodified variant thereof.

[2040] A RNAi agent comprising a first and a second strand, wherein the sequences of the first and/or second strands comprise the sequences of a first and/or second strand of: AD-39841.1 (SEQ ID NOs: 325 and 752), or a modified or unmodified variant thereof.

[2041] A RNAi agent comprising a first and a second strand, wherein the sequences of the first and/or second strands comprise the sequences of a first and/or second strand of: AD-39853.1 (SEQ ID NOs: 326 and 753), or a modified or unmodified variant thereof.

[2042] A RNAi agent comprising a first and a second strand, wherein the sequences of the first and/or second strands comprise the sequences of a first and/or second strand of: AD-39859.1 (SEQ ID NOs: 327 and 754), or a modified or unmodified variant thereof.

[2043] A RNAi agent comprising a first and a second strand, wherein the sequences of the first and/or second strands comprise the sequences of a first and/or second strand of: AD-39865.1 (SEQ ID NOs: 328 and 755), or a modified or unmodified variant thereof.

[2044] A RNAi agent comprising a first and a second strand, wherein the sequences of the first and/or second strands comprise the sequences of a first and/or second strand of: AD-39871.1 (SEQ ID NOs: 329 and 756), or a modified or unmodified variant thereof.

[2045] A RNAi agent comprising a first and a second strand, wherein the sequences of the first and/or second strands comprise the sequences of a first and/or second strand of: AD-39830.1 (SEQ ID NOs: 330 and 757), or a modified or unmodified variant thereof.

[2046] A RNAi agent comprising a first and a second strand, wherein the sequences of the first and/or second strands comprise the sequences of a first and/or second strand of: AD-39836.1 (SEQ ID NOs: 331 and 758), or a modified or unmodified variant thereof.

[2047] A RNAi agent comprising a first and a second strand, wherein the sequences of the first and/or second strands comprise the sequences of a first and/or second strand of: AD-39842.1 (SEQ ID NOs: 332 and 759), or a modified or unmodified variant thereof.

[2048] A RNAi agent comprising a first and a second strand, wherein the sequences of the first and/or second strands comprise the sequences of a first and/or second strand of: AD-39848.1 (SEQ ID NOs: 333 and 760), or a modified or unmodified variant thereof.

[2049] A RNAi agent comprising a first and a second strand, wherein the sequences of the first and/or second strands comprise the sequences of a first and/or second strand of: AD-39854.1 (SEQ ID NOs: 334 and 761), or a modified or unmodified variant thereof.

[2050] A RNAi agent comprising a first and a second strand, wherein the sequences of the first and/or second strands comprise the sequences of a first and/or second strand of: AD-39860.1 (SEQ ID NOs: 335 and 762), or a modified or unmodified variant thereof.

[2051] A RNAi agent comprising a first and a second strand, wherein the sequences of the first and/or second strands comprise the sequences of a first and/or second strand of: AD-39866.1 (SEQ ID NOs: 336 and 763), or a modified or unmodified variant thereof.

[2052] A RNAi agent comprising a first and a second strand, wherein the sequences of the first and/or second strands comprise the sequences of a first and/or second strand of: AD-39992.1 (SEQ ID NOs: 337 and 764), or a modified or unmodified variant thereof.

[2053] A RNAi agent comprising a first and a second strand, wherein the sequences of the first and/or second strands comprise the sequences of a first and/or second strand of: AD-39998.1 (SEQ ID NOs: 338 and 765), or a modified or unmodified variant thereof.

[2054] A RNAi agent comprising a first and a second strand, wherein the sequences of the first and/or second strands comprise the sequences of a first and/or second strand of: AD-40004.1 (SEQ ID NOs: 339 and 766), or a modified or unmodified variant thereof.

[2055] A RNAi agent comprising a first and a second strand, wherein the sequences of the first and/or second strands comprise the sequences of a first and/or second strand of: AD-40010.1 (SEQ ID NOs: 340 and 767), or a modified or unmodified variant thereof.

[2056] A RNAi agent comprising a first and a second strand, wherein the sequences of the first and/or second strands comprise the sequences of a first and/or second strand of: AD-40016.1 (SEQ ID NOs: 341 and 768), or a modified or unmodified variant thereof.

[2057] A RNAi agent comprising a first and a second strand, wherein the sequences of the first and/or second strands comprise the sequences of a first and/or second strand of: AD-40022.1 (SEQ ID NOs: 342 and 769), or a modified or unmodified variant thereof.

[2058] A RNAi agent comprising a first and a second strand, wherein the sequences of the first and/or second strands comprise the sequences of a first and/or second strand of: AD-40028.1 (SEQ ID NOs: 343 and 770), or a modified or unmodified variant thereof.

[2059] A RNAi agent comprising a first and a second strand, wherein the sequences of the first and/or second strands comprise the sequences of a first and/or second strand of: AD-40034.1 (SEQ ID NOs: 344 and 771), or a modified or unmodified variant thereof.

[2060] A RNAi agent comprising a first and a second strand, wherein the sequences of the first and/or second strands comprise the sequences of a first and/or second strand of: AD-39999.1 (SEQ ID NOs: 345 and 772), or a modified or unmodified variant thereof.

[2061] A RNAi agent comprising a first and a second strand, wherein the sequences of the first and/or second strands comprise the sequences of a first and/or second strand of: AD-40005.1 (SEQ ID NOs: 346 and 773), or a modified or unmodified variant thereof. A RNAi agent comprising a first and a second strand, wherein the sequences of the first and/or second strands comprise the sequences of a first and/or second strand of: AD-40011.1 (SEQ ID NOs: 347 and 774), or a modified or unmodified variant thereof.

[2062] A RNAi agent comprising a first and a second strand, wherein the sequences of the first and/or second strands comprise the sequences of a first and/or second strand of: AD-40017.1 (SEQ ID NOs: 348 and 775), or a modified or unmodified variant thereof.

[2063] A RNAi agent comprising a first and a second strand, wherein the sequences of the first and/or second strands comprise the sequences of a first and/or second strand of: AD-40029.1 (SEQ ID NOs: 349 and 776), or a modified or unmodified variant thereof.

[2064] A RNAi agent comprising a first and a second strand, wherein the sequences of the first and/or second strands comprise the sequences of a first and/or second strand of: AD-40035.1 (SEQ ID NOs: 350 and 777), or a modified or unmodified variant thereof.

[2065] A RNAi agent comprising a first and a second strand, wherein the sequences of the first and/or second strands comprise the sequences of a first and/or second strand of: AD-39994.1 (SEQ ID NOs: 351 and 778), or a modified or unmodified variant thereof.

[2066] A RNAi agent comprising a first and a second strand, wherein the sequences of the first and/or second strands comprise the sequences of a first and/or second strand of: AD-40000.1 (SEQ ID NOs: 352 and 779), or a modified or unmodified variant thereof.

[2067] A RNAi agent comprising a first and a second strand, wherein the sequences of the first and/or second strands comprise the sequences of a first and/or second strand of: AD-40006.1 (SEQ ID NOs: 353 and 780), or a modified or unmodified variant thereof.

[2068] A RNAi agent comprising a first and a second strand, wherein the sequences of the first and/or second strands comprise the sequences of a first and/or second strand of: AD-40012.1 (SEQ ID NOs: 354 and 781), or a modified or unmodified variant thereof.

[2069] A RNAi agent comprising a first and a second strand, wherein the sequences of the first and/or second strands comprise the sequences of a first and/or second strand of: AD-40018.1 (SEQ ID NOs: 355 and 782), or a modified or unmodified variant thereof.

[2070] A RNAi agent comprising a first and a second strand, wherein the sequences of the first and/or second strands comprise the sequences of a first and/or second strand of: AD-40024.1 (SEQ ID NOs: 356 and 783), or a modified or unmodified variant thereof.

[2071] A RNAi agent comprising a first and a second strand, wherein the sequences of the first and/or second strands comprise the sequences of a first and/or second strand of: AD-40030.1 (SEQ ID NOs: 357 and 784), or a modified or unmodified variant thereof.

[2072] A RNAi agent comprising a first and a second strand, wherein the sequences of the first and/or second strands comprise the sequences of a first and/or second strand of: AD-40036.1 (SEQ ID NOs: 358 and 785), or a modified or unmodified variant thereof.

[2073] A RNAi agent comprising a first and a second strand, wherein the sequences of the first and/or second strands comprise the sequences of a first and/or second strand of: AD-39995.1 (SEQ ID NOs: 359 and 786), or a modified or unmodified variant thereof.

[2074] A RNAi agent comprising a first and a second strand, wherein the sequences of the first and/or second strands comprise the sequences of a first and/or second strand of: AD-40001.1 (SEQ ID NOs: 360 and 787), or a modified or unmodified variant thereof.

[2075] A RNAi agent comprising a first and a second strand, wherein the sequences of the first and/or second strands comprise the sequences of a first and/or second strand of: AD-40007.1 (SEQ ID NOs: 361 and 788), or a modified or unmodified variant thereof.

[2076] A RNAi agent comprising a first and a second strand, wherein the sequences of the first and/or second strands comprise the sequences of a first and/or second strand of: AD-40013.1 (SEQ ID NOs: 362 and 789), or a modified or unmodified variant thereof.

[2077] A RNAi agent comprising a first and a second strand, wherein the sequences of the first and/or second strands comprise the sequences of a first and/or second strand of: AD-40019.1 (SEQ ID NOs: 363 and 790), or a modified or unmodified variant thereof.

[2078] A RNAi agent comprising a first and a second strand, wherein the sequences of the first and/or second strands comprise the sequences of a first and/or second strand of: AD-40025.1 (SEQ ID NOs: 364 and 791), or a modified or unmodified variant thereof.

[2079] A RNAi agent comprising a first and a second strand, wherein the sequences of the first and/or second strands comprise the sequences of a first and/or second strand of: AD-40031.1 (SEQ ID NOs: 365 and 792), or a modified or unmodified variant thereof.

[2080] A RNAi agent comprising a first and a second strand, wherein the sequences of the first and/or second strands comprise the sequences of a first and/or second strand of: AD-40037.1 (SEQ ID NOs: 366 and 793), or a modified or unmodified variant thereof.

[2081] A RNAi agent comprising a first and a second strand, wherein the sequences of the first and/or second strands comprise the sequences of a first and/or second strand of: AD-39996.1 (SEQ ID NOs: 367 and 794), or a modified or unmodified variant thereof.

[2082] A RNAi agent comprising a first and a second strand, wherein the sequences of the first and/or second strands comprise the sequences of a first and/or second strand of: AD-40002.1 (SEQ ID NOs: 368 and 795), or a modified or unmodified variant thereof.

[2083] A RNAi agent comprising a first and a second strand, wherein the sequences of the first and/or second strands comprise the sequences of a first and/or second strand of: AD-40008.1 (SEQ ID NOs: 369 and 796), or a modified or unmodified variant thereof.

[2084] A RNAi agent comprising a first and a second strand, wherein the sequences of the first and/or second strands comprise the sequences of a first and/or second strand of: AD-40014.1 (SEQ ID NOs: 370 and 797), or a modified or unmodified variant thereof.

[2085] A RNAi agent comprising a first and a second strand, wherein the sequences of the first and/or second strands comprise the sequences of a first and/or second strand of: AD-40020.1 (SEQ ID NOs: 371 and 798), or a modified or unmodified variant thereof.

[2086] A RNAi agent comprising a first and a second strand, wherein the sequences of the first and/or second strands comprise the sequences of a first and/or second strand of: AD-40026.1 (SEQ ID NOs: 372 and 799), or a modified or unmodified variant thereof.

[2087] A RNAi agent comprising a first and a second strand, wherein the sequences of the first and/or second strands comprise the sequences of a first and/or second strand of: AD-40032.1 (SEQ ID NOs: 373 and 800), or a modified or unmodified variant thereof.

[2088] A RNAi agent comprising a first and a second strand, wherein the sequences of the first and/or second strands comprise the sequences of a first and/or second strand of: AD-40038.1 (SEQ ID NOs: 374 and 801), or a modified or unmodified variant thereof.

[2089] A RNAi agent comprising a first and a second strand, wherein the sequences of the first and/or second strands comprise the sequences of a first and/or second strand of: AD-39997.1 (SEQ ID NOs: 375 and 802), or a modified or unmodified variant thereof.

[2090] A RNAi agent comprising a first and a second strand, wherein the sequences of the first and/or second strands comprise the sequences of a first and/or second strand of: AD-40009.1 (SEQ ID NOs: 376 and 803), or a modified or unmodified variant thereof.

[2091] A RNAi agent comprising a first and a second strand, wherein the sequences of the first and/or second strands comprise the sequences of a first and/or second strand of: AD-40015.1 (SEQ ID NOs: 377 and 804), or a modified or unmodified variant thereof.

[2092] A RNAi agent comprising a first and a second strand, wherein the sequences of the first and/or second strands comprise the sequences of a first and/or second strand of: AD-40021.1 (SEQ ID NOs: 378 and 805), or a modified or unmodified variant thereof.

[2093] A RNAi agent comprising a first and a second strand, wherein the sequences of the first and/or second strands comprise the sequences of a first and/or second strand of: AD-40027.1 (SEQ ID NOs: 379 and 806), or a modified or unmodified variant thereof.

[2094] A RNAi agent comprising a first and a second strand, wherein the sequences of the first and/or second strands comprise the sequences of a first and/or second strand of: AD-40033.1 (SEQ ID NOs: 380 and 807), or a modified or unmodified variant thereof.

[2095] A RNAi agent comprising a first and a second strand, wherein the sequences of the first and/or second strands comprise the sequences of a first and/or second strand of: AD-40039.1 (SEQ ID NOs: 381 and 808), or a modified or unmodified variant thereof.

[2096] A RNAi agent comprising a first and a second strand, wherein the sequences of the first and/or second strands comprise the sequences of a first and/or second strand of: AD-40045.1 (SEQ ID NOs: 382 and 809), or a modified or unmodified variant thereof.

[2097] A RNAi agent comprising a first and a second strand, wherein the sequences of the first and/or second strands comprise the sequences of a first and/or second strand of: AD-40051.1 (SEQ ID NOs: 383 and 810), or a modified or unmodified variant thereof.

[2098] A RNAi agent comprising a first and a second strand, wherein the sequences of the first and/or second strands comprise the sequences of a first and/or second strand of: AD-40057.1 (SEQ ID NOs: 384 and 811), or a modified or unmodified variant thereof.

[2099] A RNAi agent comprising a first and a second strand, wherein the sequences of the first and/or second strands comprise the sequences of a first and/or second strand of: AD-40063.1 (SEQ ID NOs: 385 and 812), or a modified or unmodified variant thereof.

[2100] A RNAi agent comprising a first and a second strand, wherein the sequences of the first and/or second strands comprise the sequences of a first and/or second strand of: AD-40069.1 (SEQ ID NOs: 386 and 813), or a modified or unmodified variant thereof. A RNAi agent comprising a first and a second strand, wherein the sequences of the first and/or second strands comprise the sequences of a first and/or second strand of: AD-40075.1 (SEQ ID NOs: 387 and 814), or a modified or unmodified variant thereof.

[2101] A RNAi agent comprising a first and a second strand, wherein the sequences of the first and/or second strands comprise the sequences of a first and/or second strand of: AD-40081.1 (SEQ ID NOs: 388 and 815), or a modified or unmodified variant thereof.

[2102] A RNAi agent comprising a first and a second strand, wherein the sequences of the first and/or second strands comprise the sequences of a first and/or second strand of: AD-40040.1 (SEQ ID NOs: 389 and 816), or a modified or unmodified variant thereof.

[2103] A RNAi agent comprising a first and a second strand, wherein the sequences of the first and/or second strands comprise the sequences of a first and/or second strand of: AD-40046.1 (SEQ ID NOs: 390 and 817), or a modified or unmodified variant thereof.

[2104] A RNAi agent comprising a first and a second strand, wherein the sequences of the first and/or second strands comprise the sequences of a first and/or second strand of: AD-40052.1 (SEQ ID NOs: 391 and 818), or a modified or unmodified variant thereof.

[2105] A RNAi agent comprising a first and a second strand, wherein the sequences of the first and/or second strands comprise the sequences of a first and/or second strand of: AD-40058.1 (SEQ ID NOs: 392 and 819), or a modified or unmodified variant thereof.

[2106] A RNAi agent comprising a first and a second strand, wherein the sequences of the first and/or second strands comprise the sequences of a first and/or second strand of: AD-40064.1 (SEQ ID NOs: 393 and 820), or a modified or unmodified variant thereof.

[2107] A RNAi agent comprising a first and a second strand, wherein the sequences of the first and/or second strands comprise the sequences of a first and/or second strand of: AD-40070.1 (SEQ ID NOs: 394 and 821), or a modified or unmodified variant thereof.

[2108] A RNAi agent comprising a first and a second strand, wherein the sequences of the first and/or second strands comprise the sequences of a first and/or second strand of: AD-40076.1 (SEQ ID NOs: 395 and 822), or a modified or unmodified variant thereof.

[2109] A RNAi agent comprising a first and a second strand, wherein the sequences of the first and/or second strands comprise the sequences of a first and/or second strand of: AD-40082.1 (SEQ ID NOs: 396 and 823), or a modified or unmodified variant thereof.

[2110] A RNAi agent comprising a first and a second strand, wherein the sequences of the first and/or second strands comprise the sequences of a first and/or second strand of: AD-40041.1 (SEQ ID NOs: 397 and 824), or a modified or unmodified variant thereof.

[2111] A RNAi agent comprising a first and a second strand, wherein the sequences of the first and/or second strands comprise the sequences of a first and/or second strand of: AD-40047.1 (SEQ ID NOs: 398 and 825), or a modified or unmodified variant thereof.

[2112] A RNAi agent comprising a first and a second strand, wherein the sequences of the first and/or second strands comprise the sequences of a first and/or second strand of: AD-40053.1 (SEQ ID NOs: 399 and 826), or a modified or unmodified variant thereof.

[2113] A RNAi agent comprising a first and a second strand, wherein the sequences of the first and/or second strands comprise the sequences of a first and/or second strand of: AD-40059.1 (SEQ ID NOs: 400 and 827), or a modified or unmodified variant thereof.

[2114] A RNAi agent comprising a first and a second strand, wherein the sequences of the first and/or second strands comprise the sequences of a first and/or second strand of: AD-40065.1 (SEQ ID NOs: 401 and 828), or a modified or unmodified variant thereof.

[2115] A RNAi agent comprising a first and a second strand, wherein the sequences of the first and/or second strands comprise the sequences of a first and/or second strand of: AD-40071.1 (SEQ ID NOs: 402 and 829), or a modified or unmodified variant thereof.

[2116] A RNAi agent comprising a first and a second strand, wherein the sequences of the first and/or second strands comprise the sequences of a first and/or second strand of: AD-40077.1 (SEQ ID NOs: 403 and 830), or a modified or unmodified variant thereof.

[2117] A RNAi agent comprising a first and a second strand, wherein the sequences of the first and/or second strands comprise the sequences of a first and/or second strand of: AD-40083.1 (SEQ ID NOs: 404 and 831), or a modified or unmodified variant thereof.

[2118] A RNAi agent comprising a first and a second strand, wherein the sequences of the first and/or second strands comprise the sequences of a first and/or second strand of: AD-40042.1 (SEQ ID NOs: 405 and 832), or a modified or unmodified variant thereof.

[2119] A RNAi agent comprising a first and a second strand, wherein the sequences of the first and/or second strands comprise the sequences of a first and/or second strand of: AD-40048.1 (SEQ ID NOs: 406 and 833), or a modified or unmodified variant thereof.

[2120] A RNAi agent comprising a first and a second strand, wherein the sequences of the first and/or second strands comprise the sequences of a first and/or second strand of: AD-40054.1 (SEQ ID NOs: 407 and 834), or a modified or unmodified variant thereof.

[2121] A RNAi agent comprising a first and a second strand, wherein the sequences of the first and/or second strands comprise the sequences of a first and/or second strand of: AD-40060.1 (SEQ ID NOs: 408 and 835), or a modified or unmodified variant thereof.

[2122] A RNAi agent comprising a first and a second strand, wherein the sequences of the first and/or second strands comprise the sequences of a first and/or second strand of: AD-40066.1 (SEQ ID NOs: 409 and 836), or a modified or unmodified variant thereof.

[2123] A RNAi agent comprising a first and a second strand, wherein the sequences of the first and/or second strands comprise the sequences of a first and/or second strand of: AD-40072.1 (SEQ ID NOs: 410 and 837), or a modified or unmodified variant thereof.

[2124] A RNAi agent comprising a first and a second strand, wherein the sequences of the first and/or second strands comprise the sequences of a first and/or second strand of: AD-40078.1 (SEQ ID NOs: 411 and 838), or a modified or unmodified variant thereof.

[2125] A RNAi agent comprising a first and a second strand, wherein the sequences of the first and/or second strands comprise the sequences of a first and/or second strand of: AD-40084.1 (SEQ ID NOs: 412 and 839), or a modified or unmodified variant thereof.

[2126] A RNAi agent comprising a first and a second strand, wherein the sequences of the first and/or second strands comprise the sequences of a first and/or second strand of: AD-40043.1 (SEQ ID NOs: 413 and 840), or a modified or unmodified variant thereof.

[2127] A RNAi agent comprising a first and a second strand, wherein the sequences of the first and/or second strands comprise the sequences of a first and/or second strand of: AD-40049.1 (SEQ ID NOs: 414 and 841), or a modified or unmodified variant thereof.

[2128] A RNAi agent comprising a first and a second strand, wherein the sequences of the first and/or second strands comprise the sequences of a first and/or second strand of: AD-40055.1 (SEQ ID NOs: 415 and 842), or a modified or unmodified variant thereof.

[2129] A RNAi agent comprising a first and a second strand, wherein the sequences of the first and/or second strands comprise the sequences of a first and/or second strand of: AD-40061.1 (SEQ ID NOs: 416 and 843), or a modified or unmodified variant thereof.

[2130] A RNAi agent comprising a first and a second strand, wherein the sequences of the first and/or second strands comprise the sequences of a first and/or second strand of: AD-40067.1 (SEQ ID NOs: 417 and 844), or a modified or unmodified variant thereof.

[2131] A RNAi agent comprising a first and a second strand, wherein the sequences of the first and/or second strands comprise the sequences of a first and/or second strand of: AD-40073.1 (SEQ ID NOs: 418 and 845), or a modified or unmodified variant thereof.

[2132] A RNAi agent comprising a first and a second strand, wherein the sequences of the first and/or second strands comprise the sequences of a first and/or second strand of: AD-40079.1 (SEQ ID NOs: 419 and 846), or a modified or unmodified variant thereof.

[2133] A RNAi agent comprising a first and a second strand, wherein the sequences of the first and/or second strands comprise the sequences of a first and/or second strand of: AD-40085.1 (SEQ ID NOs: 420 and 847), or a modified or unmodified variant thereof.

[2134] A RNAi agent comprising a first and a second strand, wherein the sequences of the first and/or second strands comprise the sequences of a first and/or second strand of: AD-40044.1 (SEQ ID NOs: 421 and 848), or a modified or unmodified variant thereof.

[2135] A RNAi agent comprising a first and a second strand, wherein the sequences of the first and/or second strands comprise the sequences of a first and/or second strand of: AD-40050.1 (SEQ ID NOs: 422 and 849), or a modified or unmodified variant thereof.

[2136] A RNAi agent comprising a first and a second strand, wherein the sequences of the first and/or second strands comprise the sequences of a first and/or second strand of: AD-40056.1 (SEQ ID NOs: 423 and 850), or a modified or unmodified variant thereof.

[2137] A RNAi agent comprising a first and a second strand, wherein the sequences of the first and/or second strands comprise the sequences of a first and/or second strand of: AD-40062.1 (SEQ ID NOs: 424 and 851), or a modified or unmodified variant thereof.

[2138] A RNAi agent comprising a first and a second strand, wherein the sequences of the first and/or second strands comprise the sequences of a first and/or second strand of: AD-40068.1 (SEQ ID NOs: 425 and 852), or a modified or unmodified variant thereof.

[2139] A RNAi agent comprising a first and a second strand, wherein the sequences of the first and/or second strands comprise the sequences of a first and/or second strand of: AD-40074.1 (SEQ ID NOs: 426 and 853), or a modified or unmodified variant thereof. A RNAi agent comprising a first and a second strand, wherein the sequences of the first and/or second strands comprise the sequences of a first and/or second strand of: AD-40080.1 (SEQ ID NOs: 427 and 854), or a modified or unmodified variant thereof.

[2140] A RNAi agent comprising a first and a second strand, wherein the sequences of the first and/or second strands comprise the sequences of a first and/or second strand of: AD-39720.1 (SEQ ID NOs: 1716 and 1754), or a modified or unmodified variant thereof.

[2141] A RNAi agent comprising a first and a second strand, wherein the sequences of the first and/or second strands comprise the sequences of a first and/or second strand of: AD-39706.1 (SEQ ID NOs: 1717 and 1755), or a modified or unmodified variant thereof.

[2142] A RNAi agent comprising a first and a second strand, wherein the sequences of the first and/or second strands comprise the sequences of a first and/or second strand of: AD-39712.1 (SEQ ID NOs: 1718 and 1756), or a modified or unmodified variant thereof.

[2143] A RNAi agent comprising a first and a second strand, wherein the sequences of the first and/or second strands comprise the sequences of a first and/or second strand of: AD-39760.1 (SEQ ID NOs: 1719 and 1757), or a modified or unmodified variant thereof.

[2144] A RNAi agent comprising a first and a second strand, wherein the sequences of the first and/or second strands comprise the sequences of a first and/or second strand of: AD-39732.1 (SEQ ID NOs: 1720 and 1758), or a modified or unmodified variant thereof.

[2145] A RNAi agent comprising a first and a second strand, wherein the sequences of the first and/or second strands comprise the sequences of a first and/or second strand of: AD-35541.4 (SEQ ID NOs: 1721 and 1759), or a modified or unmodified variant thereof.

[2146] A RNAi agent comprising a first and a second strand, wherein the sequences of the first and/or second strands comprise the sequences of a first and/or second strand of: AD-39735.1 or hs_KRAS_321_A22S26 (SEQ ID NOs: 1722 and 1760), or a modified or unmodified variant thereof.

[2147] A RNAi agent comprising a first and a second strand, wherein the sequences of the first and/or second strands comprise the sequences of a first and/or second strand of: AD-39741.1, or modified or unmodified variants thereof.

[2148] A RNAi agent comprising a first and a second strand, wherein the sequences of the first and/or second strands comprise the sequences of a first and/or second strand of: hs_KRAS_322_A22S26 (SEQ ID NOs: 1723 and 1761), or a modified or unmodified variant thereof.

[2149] A RNAi agent comprising a first and a second strand, wherein the sequences of the first and/or second strands comprise the sequences of a first and/or second strand of: AD-39778.1 (SEQ ID NOs: 1724 and 1762), or a modified or unmodified variant thereof.

[2150] A RNAi agent comprising a first and a second strand, wherein the sequences of the first and/or second strands comprise the sequences of a first and/or second strand of: AD-39790.1 (SEQ ID NOs: 1725 and 1763), or a modified or unmodified variant thereof.

[2151] A RNAi agent comprising a first and a second strand, wherein the sequences of the first and/or second strands comprise the sequences of a first and/or second strand of: AD-39822.1 (SEQ ID NOs: 1726 and 1764), or a modified or unmodified variant thereof. A RNAi agent comprising a first and a second strand, wherein the sequences of the first and/or second strands comprise the sequences of a first and/or second strand of: AD-35609.4 (SEQ ID NOs: 1727 and 1765), or a modified or unmodified variant thereof.

[2152] A RNAi agent comprising a first and a second strand, wherein the sequences of the first and/or second strands comprise the sequences of a first and/or second strand of: AD-35581.4 (SEQ ID NOs: 1728 and 1766), or a modified or unmodified variant thereof.

[2153] A RNAi agent comprising a first and a second strand, wherein the sequences of the first and/or second strands comprise the sequences of a first and/or second strand of: AD-39845.1 (SEQ ID NOs: 1729 and 1767), or a modified or unmodified variant thereof.

[2154] A RNAi agent comprising a first and a second strand, wherein the sequences of the first and/or second strands comprise the sequences of a first and/or second strand of: AD-39858.1 (SEQ ID NOs: 1730 and 1768), or a modified or unmodified variant thereof.

[2155] A RNAi agent comprising a first and a second strand, wherein the sequences of the first and/or second strands comprise the sequences of a first and/or second strand of: AD-39870.1 (SEQ ID NOs: 1731 and 1769), or a modified or unmodified variant thereof.

[2156] A RNAi agent comprising a first and a second strand, wherein the sequences of the first and/or second strands comprise the sequences of a first and/or second strand of: AD-35576.4 (SEQ ID NOs: 1732 and 1770), or a modified or unmodified variant thereof.

[2157] A RNAi agent comprising a first and a second strand, wherein the sequences of the first and/or second strands comprise the sequences of a first and/or second strand of: AD-35588.4 (SEQ ID NOs: 1733 and 1771), or a modified or unmodified variant thereof.

[2158] A RNAi agent comprising a first and a second strand, wherein the sequences of the first and/or second strands comprise the sequences of a first and/or second strand of: AD-35600.1 (SEQ ID NOs: 1734 and 1772), or a modified or unmodified variant thereof.

[2159] A RNAi agent comprising a first and a second strand, wherein the sequences of the first and/or second strands comprise the sequences of a first and/or second strand of: AD-35606.1 (SEQ ID NOs: 1735 and 1773), or a modified or unmodified variant thereof.

[2160] A RNAi agent comprising a first and a second strand, wherein the sequences of the first and/or second strands comprise the sequences of a first and/or second strand of: AD-38151.1 (SEQ ID NOs: 1736 and 1774), or a modified or unmodified variant thereof.

[2161] A RNAi agent comprising a first and a second strand, wherein the sequences of the first and/or second strands comprise the sequences of a first and/or second strand of: AD-38163.1 (SEQ ID NOs: 1737 and 1775), or a modified or unmodified variant thereof.

[2162] A RNAi agent comprising a first and a second strand, wherein the sequences of the first and/or second strands comprise the sequences of a first and/or second strand of: AD-39999.1 (SEQ ID NOs: 1738 and 1776), or a modified or unmodified variant thereof.

[2163] A RNAi agent comprising a first and a second strand, wherein the sequences of the first and/or second strands comprise the sequences of a first and/or second strand of: AD-38159.1 or hs_KRAS_528_A22S26 (SEQ ID NOs: 1739 and 1777), or a modified or unmodified variant thereof. A RNAi agent comprising a first and a second strand, wherein the sequences of the first and/or second strands comprise the sequences of a first and/or second strand of: AD-38130.1 or hs_KRAS_531_A22S26 (SEQ ID NOs: 1740 and 1778), or a modified or unmodified variant thereof.

[2164] A RNAi agent comprising a first and a second strand, wherein the sequences of the first and/or second strands comprise the sequences of a first and/or second strand of: AD-38136.1 (SEQ ID NOs: 1741 and 1779), or a modified or unmodified variant thereof.

[2165] A RNAi agent comprising a first and a second strand, wherein the sequences of the first and/or second strands comprise the sequences of a first and/or second strand of: AD-40036.1 (SEQ ID NOs: 1742 and 1780), or a modified or unmodified variant thereof.

[2166] A RNAi agent comprising a first and a second strand, wherein the sequences of the first and/or second strands comprise the sequences of a first and/or second strand of: AD-40008.1 (SEQ ID NOs: 1743 and 1781), or a modified or unmodified variant thereof.

[2167] A RNAi agent comprising a first and a second strand, wherein the sequences of the first and/or second strands comprise the sequences of a first and/or second strand of: AD-40021.1 (SEQ ID NOs: 1744 and 1782), or a modified or unmodified variant thereof.

[2168] A RNAi agent comprising a first and a second strand, wherein the sequences of the first and/or second strands comprise the sequences of a first and/or second strand of: AD-40077.1 (SEQ ID NOs: 1745 and 1783), or a modified or unmodified variant thereof.

[2169] A RNAi agent comprising a first and a second strand, wherein the sequences of the first and/or second strands comprise the sequences of a first and/or second strand of: AD-40072.1 (SEQ ID NOs: 1746 and 1784), or a modified or unmodified variant thereof.

[2170] A RNAi agent comprising a first and a second strand, wherein the sequences of the first and/or second strands comprise the sequences of a first and/or second strand of: AD-40061.1 (SEQ ID NOs: 1747 and 1785), or a modified or unmodified variant thereof.

[2171] A RNAi agent comprising a first and a second strand, wherein the sequences of the first and/or second strands comprise the sequences of a first and/or second strand of: AD-40068.1 (SEQ ID NOs: 1748 and 1786), or a modified or unmodified variant thereof.

[2172] A RNAi agent comprising a first and a second strand, wherein the sequences of the first and/or second strands comprise the sequences of a first and/or second strand of: AD-38131.1 (SEQ ID NOs: 1749 and 1787), or a modified or unmodified variant thereof.

[2173] A RNAi agent comprising a first and a second strand, wherein the sequences of the first and/or second strands comprise the sequences of a first and/or second strand of: AD-38167.1 (SEQ ID NOs: 1750 and 1788), or a modified or unmodified variant thereof.

[2174] A RNAi agent comprising a first and a second strand, wherein the sequences of the first and/or second strands comprise the sequences of a first and/or second strand of: hs_KRAS 1273_A22S26 (SEQ ID NOs: 1751 and 1789), or a modified or unmodified variant thereof.

[2175] A RNAi agent comprising a first and a second strand, wherein the sequences of the first and/or second strands comprise the sequences of a first and/or second strand of: hs_KRAS 2892_A37S26 (SEQ ID NOs: 1752 and 1790), or a modified or unmodified variant thereof. A RNAi agent comprising a first and a second strand, wherein the sequences of the first and/or second strands comprise the sequences of a first and/or second strand of: hs_KRAS 4731_A22S26 (SEQ ID NOs: 1753 and 1791), or a modified or unmodified variant thereof.

Specific Embodiments Wherein the Sequences of the First and/or Second Strands are the Sequences of the First and/or Second Strands of a RNAi Agent Disclosed Herein

[2176] In one embodiment, the present disclosure pertains to a composition comprising any one or more of: a RNAi agent comprising a first and a second strand, wherein the sequences of the first and/or second strands are the sequences of the first and/or second strands of any RNAi agent from any of Tables 1 to 6, or modified and unmodified variants thereof.

[2177] Thus, in various embodiments, the present disclosure pertains to a composition comprising any one or more of the following: A RNAi agent comprising a first and a second strand, wherein the sequences of the first and/or second strands are the sequences of the first and/or second strands of: AD-35523.3 (SEQ ID NOs: 1 and 428), or a modified or unmodified variant thereof.

[2178] A RNAi agent comprising a first and a second strand, wherein the sequences of the first and/or second strands are the sequences of the first and/or second strands of: AD-35529.1 (SEQ ID NOs: 2 and 429), or a modified or unmodified variant thereof.

[2179] A RNAi agent comprising a first and a second strand, wherein the sequences of the first and/or second strands are the sequences of the first and/or second strands of: AD-35535.4 (SEQ ID NOs: 3 and 430), or a modified or unmodified variant thereof.

[2180] A RNAi agent comprising a first and a second strand, wherein the sequences of the first and/or second strands are the sequences of the first and/or second strands of: AD-35541.4 (SEQ ID NOs: 4 and 431), or a modified or unmodified variant thereof.

[2181] A RNAi agent comprising a first and a second strand, wherein the sequences of the first and/or second strands are the sequences of the first and/or second strands of: AD-35547.4 (SEQ ID NOs: 5 and 432), or a modified or unmodified variant thereof.

[2182] A RNAi agent comprising a first and a second strand, wherein the sequences of the first and/or second strands are the sequences of the first and/or second strands of: AD-35553.4 (SEQ ID NOs: 6 and 433), or a modified or unmodified variant thereof.

[2183] A RNAi agent comprising a first and a second strand, wherein the sequences of the first and/or second strands are the sequences of the first and/or second strands of: AD-35559.4 (SEQ ID NOs: 7 and 434), or a modified or unmodified variant thereof.

[2184] A RNAi agent comprising a first and a second strand, wherein the sequences of the first and/or second strands are the sequences of the first and/or second strands of: AD-35565.4 (SEQ ID NOs: 8 and 435), or a modified or unmodified variant thereof.

[2185] A RNAi agent comprising a first and a second strand, wherein the sequences of the first and/or second strands are the sequences of the first and/or second strands of: AD-35524.4 (SEQ ID NOs: 9 and 436), or a modified or unmodified variant thereof.

[2186] A RNAi agent comprising a first and a second strand, wherein the sequences of the first and/or second strands are the sequences of the first and/or second strands of: AD-35530.4 (SEQ ID NOs: 10 and 437), or a modified or unmodified variant thereof.

[2187] A RNAi agent comprising a first and a second strand, wherein the sequences of the first and/or second strands are the sequences of the first and/or second strands of: AD-35536.4 (SEQ ID NOs: 11 and 438), or a modified or unmodified variant thereof.

[2188] A RNAi agent comprising a first and a second strand, wherein the sequences of the first and/or second strands are the sequences of the first and/or second strands of: AD-35542.4 (SEQ ID NOs: 12 and 439), or a modified or unmodified variant thereof.

[2189] A RNAi agent comprising a first and a second strand, wherein the sequences of the first and/or second strands are the sequences of the first and/or second strands of: AD-35548.4 (SEQ ID NOs: 13 and 440), or a modified or unmodified variant thereof.

[2190] A RNAi agent comprising a first and a second strand, wherein the sequences of the first and/or second strands are the sequences of the first and/or second strands of: AD-35554.4 (SEQ ID NOs: 14 and 441), or a modified or unmodified variant thereof.

[2191] A RNAi agent comprising a first and a second strand, wherein the sequences of the first and/or second strands are the sequences of the first and/or second strands of: AD-35560.2 (SEQ ID NOs: 15 and 442), or a modified or unmodified variant thereof.

[2192] A RNAi agent comprising a first and a second strand, wherein the sequences of the first and/or second strands are the sequences of the first and/or second strands of: AD-35566.4 (SEQ ID NOs: 16 and 443), or a modified or unmodified variant thereof.

[2193] A RNAi agent comprising a first and a second strand, wherein the sequences of the first and/or second strands are the sequences of the first and/or second strands of: AD-35525.2 (SEQ ID NOs: 17 and 444), or a modified or unmodified variant thereof.

[2194] A RNAi agent comprising a first and a second strand, wherein the sequences of the first and/or second strands are the sequences of the first and/or second strands of: AD-35531.4 (SEQ ID NOs: 18 and 445), or a modified or unmodified variant thereof.

[2195] A RNAi agent comprising a first and a second strand, wherein the sequences of the first and/or second strands are the sequences of the first and/or second strands of: AD-35537.4 (SEQ ID NOs: 19 and 446), or a modified or unmodified variant thereof.

[2196] A RNAi agent comprising a first and a second strand, wherein the sequences of the first and/or second strands are the sequences of the first and/or second strands of: AD-35543.2 (SEQ ID NOs: 20 and 447), or a modified or unmodified variant thereof.

[2197] A RNAi agent comprising a first and a second strand, wherein the sequences of the first and/or second strands are the sequences of the first and/or second strands of: AD-35549.4 (SEQ ID NOs: 21 and 448), or a modified or unmodified variant thereof.

[2198] A RNAi agent comprising a first and a second strand, wherein the sequences of the first and/or second strands are the sequences of the first and/or second strands of: AD-35555.4 (SEQ ID NOs: 22 and 449), or a modified or unmodified variant thereof.

[2199] A RNAi agent comprising a first and a second strand, wherein the sequences of the first and/or second strands are the sequences of the first and/or second strands of: AD-35561.4 (SEQ ID NOs: 23 and 450), or a modified or unmodified variant thereof.

[2200] A RNAi agent comprising a first and a second strand, wherein the sequences of the first and/or second strands are the sequences of the first and/or second strands of: AD-35567.4 (SEQ ID NOs: 24 and 451), or a modified or unmodified variant thereof.

[2201] A RNAi agent comprising a first and a second strand, wherein the sequences of the first and/or second strands are the sequences of the first and/or second strands of: AD-35526.4 (SEQ ID NOs: 25 and 452), or a modified or unmodified variant thereof.

[2202] A RNAi agent comprising a first and a second strand, wherein the sequences of the first and/or second strands are the sequences of the first and/or second strands of: AD-35532.4 (SEQ ID NOs: 26 and 453), or a modified or unmodified variant thereof.

[2203] A RNAi agent comprising a first and a second strand, wherein the sequences of the first and/or second strands are the sequences of the first and/or second strands of: AD-35538.4 (SEQ ID NOs: 27 and 454), or a modified or unmodified variant thereof.

[2204] A RNAi agent comprising a first and a second strand, wherein the sequences of the first and/or second strands are the sequences of the first and/or second strands of: AD-35544.4 (SEQ ID NOs: 28 and 455), or a modified or unmodified variant thereof.

[2205] A RNAi agent comprising a first and a second strand, wherein the sequences of the first and/or second strands are the sequences of the first and/or second strands of: AD-35550.4 (SEQ ID NOs: 29 and 456), or a modified or unmodified variant thereof.

[2206] A RNAi agent comprising a first and a second strand, wherein the sequences of the first and/or second strands are the sequences of the first and/or second strands of: AD-35556.4 (SEQ ID NOs: 30 and 457), or a modified or unmodified variant thereof.

[2207] A RNAi agent comprising a first and a second strand, wherein the sequences of the first and/or second strands are the sequences of the first and/or second strands of: AD-35562.4 (SEQ ID NOs: 31 and 458), or a modified or unmodified variant thereof.

[2208] A RNAi agent comprising a first and a second strand, wherein the sequences of the first and/or second strands are the sequences of the first and/or second strands of: AD-35568.4 (SEQ ID NOs: 32 and 459), or a modified or unmodified variant thereof.

[2209] A RNAi agent comprising a first and a second strand, wherein the sequences of the first and/or second strands are the sequences of the first and/or second strands of: AD-35527.4 (SEQ ID NOs: 33 and 460), or a modified or unmodified variant thereof.

[2210] A RNAi agent comprising a first and a second strand, wherein the sequences of the first and/or second strands are the sequences of the first and/or second strands of: AD-35533.4 (SEQ ID NOs: 34 and 461), or a modified or unmodified variant thereof.

[2211] A RNAi agent comprising a first and a second strand, wherein the sequences of the first and/or second strands are the sequences of the first and/or second strands of: AD-35539.4 (SEQ ID NOs: 35 and 462), or a modified or unmodified variant thereof.

[2212] A RNAi agent comprising a first and a second strand, wherein the sequences of the first and/or second strands are the sequences of the first and/or second strands of: AD-35545.4 (SEQ ID NOs: 36 and 463), or a modified or unmodified variant thereof. A RNAi agent comprising a first and a second strand, wherein the sequences of the first and/or second strands are the sequences of the first and/or second strands of: AD-35551.4 (SEQ ID NOs: 37 and 464), or a modified or unmodified variant thereof.

[2213] A RNAi agent comprising a first and a second strand, wherein the sequences of the first and/or second strands are the sequences of the first and/or second strands of: AD-35563.4 (SEQ ID NOs: 38 and 465), or a modified or unmodified variant thereof.

[2214] A RNAi agent comprising a first and a second strand, wherein the sequences of the first and/or second strands are the sequences of the first and/or second strands of: AD-35528.4 (SEQ ID NOs: 39 and 466), or a modified or unmodified variant thereof.

[2215] A RNAi agent comprising a first and a second strand, wherein the sequences of the first and/or second strands are the sequences of the first and/or second strands of: AD-35540.4 (SEQ ID NOs: 40 and 467), or a modified or unmodified variant thereof.

[2216] A RNAi agent comprising a first and a second strand, wherein the sequences of the first and/or second strands are the sequences of the first and/or second strands of: AD-35546.4 (SEQ ID NOs: 41 and 468), or a modified or unmodified variant thereof.

[2217] A RNAi agent comprising a first and a second strand, wherein the sequences of the first and/or second strands are the sequences of the first and/or second strands of: AD-35552.4 (SEQ ID NOs: 42 and 469), or a modified or unmodified variant thereof.

[2218] A RNAi agent comprising a first and a second strand, wherein the sequences of the first and/or second strands are the sequences of the first and/or second strands of: AD-35558.4 (SEQ ID NOs: 43 and 470), or a modified or unmodified variant thereof.

[2219] A RNAi agent comprising a first and a second strand, wherein the sequences of the first and/or second strands are the sequences of the first and/or second strands of: AD-35564.4 (SEQ ID NOs: 44 and 471), or a modified or unmodified variant thereof.

[2220] A RNAi agent comprising a first and a second strand, wherein the sequences of the first and/or second strands are the sequences of the first and/or second strands of: AD-35570.4 (SEQ ID NOs: 45 and 472), or a modified or unmodified variant thereof.

[2221] A RNAi agent comprising a first and a second strand, wherein the sequences of the first and/or second strands are the sequences of the first and/or second strands of: AD-35571.4 (SEQ ID NOs: 46 and 473), or a modified or unmodified variant thereof.

[2222] A RNAi agent comprising a first and a second strand, wherein the sequences of the first and/or second strands are the sequences of the first and/or second strands of: AD-35577.4 (SEQ ID NOs: 47 and 474), or a modified or unmodified variant thereof.

[2223] A RNAi agent comprising a first and a second strand, wherein the sequences of the first and/or second strands are the sequences of the first and/or second strands of: AD-35583.4 (SEQ ID NOs: 48 and 475), or a modified or unmodified variant thereof.

[2224] A RNAi agent comprising a first and a second strand, wherein the sequences of the first and/or second strands are the sequences of the first and/or second strands of: AD-35589.4 (SEQ ID NOs: 49 and 476), or a modified or unmodified variant thereof.

[2225] A RNAi agent comprising a first and a second strand, wherein the sequences of the first and/or second strands are the sequences of the first and/or second strands of: AD-35595.4 (SEQ ID NOs: 50 and 477), or a modified or unmodified variant thereof.

[2226] A RNAi agent comprising a first and a second strand, wherein the sequences of the first and/or second strands are the sequences of the first and/or second strands of: AD-35601.4 (SEQ ID NOs: 51 and 478), or a modified or unmodified variant thereof.

[2227] A RNAi agent comprising a first and a second strand, wherein the sequences of the first and/or second strands are the sequences of the first and/or second strands of: AD-35607.4 (SEQ ID NOs: 52 and 479), or a modified or unmodified variant thereof.

[2228] A RNAi agent comprising a first and a second strand, wherein the sequences of the first and/or second strands are the sequences of the first and/or second strands of: AD-35613.4 (SEQ ID NOs: 53 and 480), or a modified or unmodified variant thereof.

[2229] A RNAi agent comprising a first and a second strand, wherein the sequences of the first and/or second strands are the sequences of the first and/or second strands of: AD-35572.4 (SEQ ID NOs: 54 and 481), or a modified or unmodified variant thereof.

[2230] A RNAi agent comprising a first and a second strand, wherein the sequences of the first and/or second strands are the sequences of the first and/or second strands of: AD-35578.4 (SEQ ID NOs: 55 and 482), or a modified or unmodified variant thereof.

[2231] A RNAi agent comprising a first and a second strand, wherein the sequences of the first and/or second strands are the sequences of the first and/or second strands of: AD-35584.4 (SEQ ID NOs: 56 and 483), or a modified or unmodified variant thereof.

[2232] A RNAi agent comprising a first and a second strand, wherein the sequences of the first and/or second strands are the sequences of the first and/or second strands of: AD-35590.4 (SEQ ID NOs: 57 and 484), or a modified or unmodified variant thereof.

[2233] A RNAi agent comprising a first and a second strand, wherein the sequences of the first and/or second strands are the sequences of the first and/or second strands of: AD-35596.4 (SEQ ID NOs: 58 and 485), or a modified or unmodified variant thereof.

[2234] A RNAi agent comprising a first and a second strand, wherein the sequences of the first and/or second strands are the sequences of the first and/or second strands of: AD-35602.4 (SEQ ID NOs: 59 and 486), or a modified or unmodified variant thereof.

[2235] A RNAi agent comprising a first and a second strand, wherein the sequences of the first and/or second strands are the sequences of the first and/or second strands of: AD-35608.4 (SEQ ID NOs: 60 and 487), or a modified or unmodified variant thereof.

[2236] A RNAi agent comprising a first and a second strand, wherein the sequences of the first and/or second strands are the sequences of the first and/or second strands of: AD-35614.4 (SEQ ID NOs: 61 and 488), or a modified or unmodified variant thereof.

[2237] A RNAi agent comprising a first and a second strand, wherein the sequences of the first and/or second strands are the sequences of the first and/or second strands of: AD-35573.4 (SEQ ID NOs: 62 and 489), or a modified or unmodified variant thereof.

[2238] A RNAi agent comprising a first and a second strand, wherein the sequences of the first and/or second strands are the sequences of the first and/or second strands of: AD-35579.4 (SEQ ID NOs: 63 and 490), or a modified or unmodified variant thereof.

[2239] A RNAi agent comprising a first and a second strand, wherein the sequences of the first and/or second strands are the sequences of the first and/or second strands of: AD-35585.4 (SEQ ID NOs: 64 and 491), or a modified or unmodified variant thereof.

[2240] A RNAi agent comprising a first and a second strand, wherein the sequences of the first and/or second strands are the sequences of the first and/or second strands of: AD-35591.4 (SEQ ID NOs: 65 and 492), or a modified or unmodified variant thereof.

[2241] A RNAi agent comprising a first and a second strand, wherein the sequences of the first and/or second strands are the sequences of the first and/or second strands of: AD-35597.4 (SEQ ID NOs: 66 and 493), or a modified or unmodified variant thereof.

[2242] A RNAi agent comprising a first and a second strand, wherein the sequences of the first and/or second strands are the sequences of the first and/or second strands of: AD-35603.4 (SEQ ID NOs: 67 and 494), or a modified or unmodified variant thereof.

[2243] A RNAi agent comprising a first and a second strand, wherein the sequences of the first and/or second strands are the sequences of the first and/or second strands of: AD-35609.4 (SEQ ID NOs: 68 and 495), or a modified or unmodified variant thereof.

[2244] A RNAi agent comprising a first and a second strand, wherein the sequences of the first and/or second strands are the sequences of the first and/or second strands of: AD-35615.4 (SEQ ID NOs: 69 and 496), or a modified or unmodified variant thereof.

[2245] A RNAi agent comprising a first and a second strand, wherein the sequences of the first and/or second strands are the sequences of the first and/or second strands of: AD-35574.4 (SEQ ID NOs: 70 and 497), or a modified or unmodified variant thereof.

[2246] A RNAi agent comprising a first and a second strand, wherein the sequences of the first and/or second strands are the sequences of the first and/or second strands of: AD-35580.1 (SEQ ID NOs: 71 and 498), or a modified or unmodified variant thereof.

[2247] A RNAi agent comprising a first and a second strand, wherein the sequences of the first and/or second strands are the sequences of the first and/or second strands of: AD-35586.4 (SEQ ID NOs: 72 and 499), or a modified or unmodified variant thereof.

[2248] A RNAi agent comprising a first and a second strand, wherein the sequences of the first and/or second strands are the sequences of the first and/or second strands of: AD-35592.4 (SEQ ID NOs: 73 and 500), or a modified or unmodified variant thereof.

[2249] A RNAi agent comprising a first and a second strand, wherein the sequences of the first and/or second strands are the sequences of the first and/or second strands of: AD-35598.4 (SEQ ID NOs: 74 and 501), or a modified or unmodified variant thereof.

[2250] A RNAi agent comprising a first and a second strand, wherein the sequences of the first and/or second strands are the sequences of the first and/or second strands of: AD-35604.4 (SEQ ID NOs: 75 and 502), or a modified or unmodified variant thereof.

[2251] A RNAi agent comprising a first and a second strand, wherein the sequences of the first and/or second strands are the sequences of the first and/or second strands of: AD-35610.4 (SEQ ID NOs: 76 and 503), or a modified or unmodified variant thereof. A RNAi agent comprising a first and a second strand, wherein the sequences of the first and/or second strands are the sequences of the first and/or second strands of: AD-35616.4 (SEQ ID NOs: 77 and 504), or a modified or unmodified variant thereof.

[2252] A RNAi agent comprising a first and a second strand, wherein the sequences of the first and/or second strands are the sequences of the first and/or second strands of: AD-35575.4 (SEQ ID NOs: 78 and 505), or a modified or unmodified variant thereof.

[2253] A RNAi agent comprising a first and a second strand, wherein the sequences of the first and/or second strands are the sequences of the first and/or second strands of: AD-35581.4 (SEQ ID NOs: 79 and 506), or a modified or unmodified variant thereof.

[2254] A RNAi agent comprising a first and a second strand, wherein the sequences of the first and/or second strands are the sequences of the first and/or second strands of: AD-35587.4 (SEQ ID NOs: 80 and 507), or a modified or unmodified variant thereof.

[2255] A RNAi agent comprising a first and a second strand, wherein the sequences of the first and/or second strands are the sequences of the first and/or second strands of: AD-35593.4 (SEQ ID NOs: 81 and 508), or a modified or unmodified variant thereof.

[2256] A RNAi agent comprising a first and a second strand, wherein the sequences of the first and/or second strands are the sequences of the first and/or second strands of: AD-35599.4 (SEQ ID NOs: 82 and 509), or a modified or unmodified variant thereof.

[2257] A RNAi agent comprising a first and a second strand, wherein the sequences of the first and/or second strands are the sequences of the first and/or second strands of: AD-35605.4 (SEQ ID NOs: 83 and 510), or a modified or unmodified variant thereof.

[2258] A RNAi agent comprising a first and a second strand, wherein the sequences of the first and/or second strands are the sequences of the first and/or second strands of: AD-35611.4 (SEQ ID NOs: 84 and 511), or a modified or unmodified variant thereof.

[2259] A RNAi agent comprising a first and a second strand, wherein the sequences of the first and/or second strands are the sequences of the first and/or second strands of: AD-35617.4 (SEQ ID NOs: 85 and 512), or a modified or unmodified variant thereof.

[2260] A RNAi agent comprising a first and a second strand, wherein the sequences of the first and/or second strands are the sequences of the first and/or second strands of: AD-35576.4 (SEQ ID NOs: 86 and 513), or a modified or unmodified variant thereof.

[2261] A RNAi agent comprising a first and a second strand, wherein the sequences of the first and/or second strands are the sequences of the first and/or second strands of: AD-35588.4 (SEQ ID NOs: 87 and 514), or a modified or unmodified variant thereof.

[2262] A RNAi agent comprising a first and a second strand, wherein the sequences of the first and/or second strands are the sequences of the first and/or second strands of: AD-35667.1 (SEQ ID NOs: 88 and 515), or a modified or unmodified variant thereof.

[2263] A RNAi agent comprising a first and a second strand, wherein the sequences of the first and/or second strands are the sequences of the first and/or second strands of: AD-35673.1 (SEQ ID NOs: 89 and 516), or a modified or unmodified variant thereof.

[2264] A RNAi agent comprising a first and a second strand, wherein the sequences of the first and/or second strands are the sequences of the first and/or second strands of: AD-35679.1 (SEQ ID NOs: 90 and 517), or a modified or unmodified variant thereof.

[2265] A RNAi agent comprising a first and a second strand, wherein the sequences of the first and/or second strands are the sequences of the first and/or second strands of: AD-35685.1 (SEQ ID NOs: 91 and 518), or a modified or unmodified variant thereof.

[2266] A RNAi agent comprising a first and a second strand, wherein the sequences of the first and/or second strands are the sequences of the first and/or second strands of: AD-35691.1 (SEQ ID NOs: 92 and 519), or a modified or unmodified variant thereof.

[2267] A RNAi agent comprising a first and a second strand, wherein the sequences of the first and/or second strands are the sequences of the first and/or second strands of: AD-35557.1 (SEQ ID NOs: 93 and 520), or a modified or unmodified variant thereof.

[2268] A RNAi agent comprising a first and a second strand, wherein the sequences of the first and/or second strands are the sequences of the first and/or second strands of: AD-35618.1 (SEQ ID NOs: 94 and 521), or a modified or unmodified variant thereof.

[2269] A RNAi agent comprising a first and a second strand, wherein the sequences of the first and/or second strands are the sequences of the first and/or second strands of: AD-35569.1 (SEQ ID NOs: 95 and 522), or a modified or unmodified variant thereof.

[2270] A RNAi agent comprising a first and a second strand, wherein the sequences of the first and/or second strands are the sequences of the first and/or second strands of: AD-35534.1 (SEQ ID NOs: 96 and 523), or a modified or unmodified variant thereof.

[2271] A RNAi agent comprising a first and a second strand, wherein the sequences of the first and/or second strands are the sequences of the first and/or second strands of: AD-35582.1 (SEQ ID NOs: 97 and 524), or a modified or unmodified variant thereof.

[2272] A RNAi agent comprising a first and a second strand, wherein the sequences of the first and/or second strands are the sequences of the first and/or second strands of: AD-35594.1 (SEQ ID NOs: 98 and 525), or a modified or unmodified variant thereof.

[2273] A RNAi agent comprising a first and a second strand, wherein the sequences of the first and/or second strands are the sequences of the first and/or second strands of: AD-35600.1 (SEQ ID NOs: 99 and 526), or a modified or unmodified variant thereof.

[2274] A RNAi agent comprising a first and a second strand, wherein the sequences of the first and/or second strands are the sequences of the first and/or second strands of: AD-35606.1 (SEQ ID NOs: 100 and 527), or a modified or unmodified variant thereof.

[2275] A RNAi agent comprising a first and a second strand, wherein the sequences of the first and/or second strands are the sequences of the first and/or second strands of: AD-35612.1 (SEQ ID NOs: 101 and 528), or a modified or unmodified variant thereof.

[2276] A RNAi agent comprising a first and a second strand, wherein the sequences of the first and/or second strands are the sequences of the first and/or second strands of: AD-38127.1 (SEQ ID NOs: 102 and 529), or a modified or unmodified variant thereof.

[2277] A RNAi agent comprising a first and a second strand, wherein the sequences of the first and/or second strands are the sequences of the first and/or second strands of: AD-38133.1 (SEQ ID NOs: 103 and 530), or a modified or unmodified variant thereof.

[2278] A RNAi agent comprising a first and a second strand, wherein the sequences of the first and/or second strands are the sequences of the first and/or second strands of: AD-38139.1 (SEQ ID NOs: 104 and 531), or a modified or unmodified variant thereof.

[2279] A RNAi agent comprising a first and a second strand, wherein the sequences of the first and/or second strands are the sequences of the first and/or second strands of: AD-38145.1 (SEQ ID NOs: 105 and 532), or a modified or unmodified variant thereof.

[2280] A RNAi agent comprising a first and a second strand, wherein the sequences of the first and/or second strands are the sequences of the first and/or second strands of: AD-38151.1 (SEQ ID NOs: 106 and 533), or a modified or unmodified variant thereof.

[2281] A RNAi agent comprising a first and a second strand, wherein the sequences of the first and/or second strands are the sequences of the first and/or second strands of: AD-38157.1 (SEQ ID NOs: 107 and 534), or a modified or unmodified variant thereof.

[2282] A RNAi agent comprising a first and a second strand, wherein the sequences of the first and/or second strands are the sequences of the first and/or second strands of: AD-38163.1 (SEQ ID NOs: 108 and 535), or a modified or unmodified variant thereof.

[2283] A RNAi agent comprising a first and a second strand, wherein the sequences of the first and/or second strands are the sequences of the first and/or second strands of: AD-38169.1 (SEQ ID NOs: 109 and 536), or a modified or unmodified variant thereof.

[2284] A RNAi agent comprising a first and a second strand, wherein the sequences of the first and/or second strands are the sequences of the first and/or second strands of: AD-38128.1 (SEQ ID NOs: 110 and 537), or a modified or unmodified variant thereof.

[2285] A RNAi agent comprising a first and a second strand, wherein the sequences of the first and/or second strands are the sequences of the first and/or second strands of: AD-38134.1 (SEQ ID NOs: 111 and 538), or a modified or unmodified variant thereof.

[2286] A RNAi agent comprising a first and a second strand, wherein the sequences of the first and/or second strands are the sequences of the first and/or second strands of: AD-38140.1 (SEQ ID NOs: 112 and 539), or a modified or unmodified variant thereof.

[2287] A RNAi agent comprising a first and a second strand, wherein the sequences of the first and/or second strands are the sequences of the first and/or second strands of: AD-38146.1 (SEQ ID NOs: 113 and 540), or a modified or unmodified variant thereof.

[2288] A RNAi agent comprising a first and a second strand, wherein the sequences of the first and/or second strands are the sequences of the first and/or second strands of: AD-38152.1 (SEQ ID NOs: 114 and 541), or a modified or unmodified variant thereof.

[2289] A RNAi agent comprising a first and a second strand, wherein the sequences of the first and/or second strands are the sequences of the first and/or second strands of: AD-38158.1 (SEQ ID NOs: 115 and 542), or a modified or unmodified variant thereof.

[2290] A RNAi agent comprising a first and a second strand, wherein the sequences of the first and/or second strands are the sequences of the first and/or second strands of: AD-38164.1 (SEQ ID NOs: 116 and 543), or a modified or unmodified variant thereof. A RNAi agent comprising a first and a second strand, wherein the sequences of the first and/or second strands are the sequences of the first and/or second strands of: AD-38170.1 (SEQ ID NOs: 117 and 544), or a modified or unmodified variant thereof.

[2291] A RNAi agent comprising a first and a second strand, wherein the sequences of the first and/or second strands are the sequences of the first and/or second strands of: AD-38129.1 (SEQ ID NOs: 118 and 545), or a modified or unmodified variant thereof.

[2292] A RNAi agent comprising a first and a second strand, wherein the sequences of the first and/or second strands are the sequences of the first and/or second strands of: AD-38135.1 (SEQ ID NOs: 119 and 546), or a modified or unmodified variant thereof.

[2293] A RNAi agent comprising a first and a second strand, wherein the sequences of the first and/or second strands are the sequences of the first and/or second strands of: AD-38141.1 (SEQ ID NOs: 120 and 547), or a modified or unmodified variant thereof.

[2294] A RNAi agent comprising a first and a second strand, wherein the sequences of the first and/or second strands are the sequences of the first and/or second strands of: AD-38147.1 (SEQ ID NOs: 121 and 548), or a modified or unmodified variant thereof.

[2295] A RNAi agent comprising a first and a second strand, wherein the sequences of the first and/or second strands are the sequences of the first and/or second strands of: AD-38153.1 (SEQ ID NOs: 122 and 549), or a modified or unmodified variant thereof.

[2296] A RNAi agent comprising a first and a second strand, wherein the sequences of the first and/or second strands are the sequences of the first and/or second strands of: AD-38159.1 (SEQ ID NOs: 123 and 550), or a modified or unmodified variant thereof.

[2297] A RNAi agent comprising a first and a second strand, wherein the sequences of the first and/or second strands are the sequences of the first and/or second strands of: AD-38165.1 (SEQ ID NOs: 124 and 551), or a modified or unmodified variant thereof.

[2298] A RNAi agent comprising a first and a second strand, wherein the sequences of the first and/or second strands are the sequences of the first and/or second strands of: AD-38171.1 (SEQ ID NOs: 125 and 552), or a modified or unmodified variant thereof.

[2299] A RNAi agent comprising a first and a second strand, wherein the sequences of the first and/or second strands are the sequences of the first and/or second strands of: AD-38130.1 (SEQ ID NOs: 126 and 553), or a modified or unmodified variant thereof.

[2300] A RNAi agent comprising a first and a second strand, wherein the sequences of the first and/or second strands are the sequences of the first and/or second strands of: AD-38136.1 (SEQ ID NOs: 127 and 554), or a modified or unmodified variant thereof.

[2301] A RNAi agent comprising a first and a second strand, wherein the sequences of the first and/or second strands are the sequences of the first and/or second strands of: AD-38142.1 (SEQ ID NOs: 128 and 555), or a modified or unmodified variant thereof.

[2302] A RNAi agent comprising a first and a second strand, wherein the sequences of the first and/or second strands are the sequences of the first and/or second strands of: AD-38148.1 (SEQ ID NOs: 129 and 556), or a modified or unmodified variant thereof.

[2303] A RNAi agent comprising a first and a second strand, wherein the sequences of the first and/or second strands are the sequences of the first and/or second strands of: AD-38154.1 (SEQ ID NOs: 130 and 557), or a modified or unmodified variant thereof.

[2304] A RNAi agent comprising a first and a second strand, wherein the sequences of the first and/or second strands are the sequences of the first and/or second strands of: AD-38160.1 (SEQ ID NOs: 131 and 558), or a modified or unmodified variant thereof.

[2305] A RNAi agent comprising a first and a second strand, wherein the sequences of the first and/or second strands are the sequences of the first and/or second strands of: AD-38166.1 (SEQ ID NOs: 132 and 559), or a modified or unmodified variant thereof.

[2306] A RNAi agent comprising a first and a second strand, wherein the sequences of the first and/or second strands are the sequences of the first and/or second strands of: AD-38172.1 (SEQ ID NOs: 133 and 560), or a modified or unmodified variant thereof.

[2307] A RNAi agent comprising a first and a second strand, wherein the sequences of the first and/or second strands are the sequences of the first and/or second strands of: AD-38131.1 (SEQ ID NOs: 134 and 561), or a modified or unmodified variant thereof.

[2308] A RNAi agent comprising a first and a second strand, wherein the sequences of the first and/or second strands are the sequences of the first and/or second strands of: AD-38137.1 (SEQ ID NOs: 135 and 562), or a modified or unmodified variant thereof.

[2309] A RNAi agent comprising a first and a second strand, wherein the sequences of the first and/or second strands are the sequences of the first and/or second strands of: AD-38143.1 (SEQ ID NOs: 136 and 563), or a modified or unmodified variant thereof.

[2310] A RNAi agent comprising a first and a second strand, wherein the sequences of the first and/or second strands are the sequences of the first and/or second strands of: AD-38149.1 (SEQ ID NOs: 137 and 564), or a modified or unmodified variant thereof.

[2311] A RNAi agent comprising a first and a second strand, wherein the sequences of the first and/or second strands are the sequences of the first and/or second strands of: AD-38155.1 (SEQ ID NOs: 138 and 565), or a modified or unmodified variant thereof.

[2312] A RNAi agent comprising a first and a second strand, wherein the sequences of the first and/or second strands are the sequences of the first and/or second strands of: AD-38161.1 (SEQ ID NOs: 139 and 566), or a modified or unmodified variant thereof.

[2313] A RNAi agent comprising a first and a second strand, wherein the sequences of the first and/or second strands are the sequences of the first and/or second strands of: AD-38167.1 (SEQ ID NOs: 140 and 567), or a modified or unmodified variant thereof.

[2314] A RNAi agent comprising a first and a second strand, wherein the sequences of the first and/or second strands are the sequences of the first and/or second strands of: AD-38173.1 (SEQ ID NOs: 141 and 568), or a modified or unmodified variant thereof.

[2315] A RNAi agent comprising a first and a second strand, wherein the sequences of the first and/or second strands are the sequences of the first and/or second strands of: AD-38132.1 (SEQ ID NOs: 142 and 569), or a modified or unmodified variant thereof.

[2316] A RNAi agent comprising a first and a second strand, wherein the sequences of the first and/or second strands are the sequences of the first and/or second strands of: AD-38138.1 (SEQ ID NOs: 143 and 570), or a modified or unmodified variant thereof.

[2317] A RNAi agent comprising a first and a second strand, wherein the sequences of the first and/or second strands are the sequences of the first and/or second strands of: AD-38144.1 (SEQ ID NOs: 144 and 571), or a modified or unmodified variant thereof.

[2318] A RNAi agent comprising a first and a second strand, wherein the sequences of the first and/or second strands are the sequences of the first and/or second strands of: AD-38150.1 (SEQ ID NOs: 145 and 572), or a modified or unmodified variant thereof.

[2319] A RNAi agent comprising a first and a second strand, wherein the sequences of the first and/or second strands are the sequences of the first and/or second strands of: AD-38156.1 (SEQ ID NOs: 146 and 573), or a modified or unmodified variant thereof.

[2320] A RNAi agent comprising a first and a second strand, wherein the sequences of the first and/or second strands are the sequences of the first and/or second strands of: AD-38162.1 (SEQ ID NOs: 147 and 574), or a modified or unmodified variant thereof.

[2321] A RNAi agent comprising a first and a second strand, wherein the sequences of the first and/or second strands are the sequences of the first and/or second strands of: AD-38168.1 (SEQ ID NOs: 148 and 575), or a modified or unmodified variant thereof.

[2322] A RNAi agent comprising a first and a second strand, wherein the sequences of the first and/or second strands are the sequences of the first and/or second strands of: AD-38174.1 (SEQ ID NOs: 149 and 576), or a modified or unmodified variant thereof.

[2323] A RNAi agent comprising a first and a second strand, wherein the sequences of the first and/or second strands are the sequences of the first and/or second strands of: AD-39683.1 (SEQ ID NOs: 150 and 577), or a modified or unmodified variant thereof.

[2324] A RNAi agent comprising a first and a second strand, wherein the sequences of the first and/or second strands are the sequences of the first and/or second strands of: AD-39689.1 (SEQ ID NOs: 151 and 578), or a modified or unmodified variant thereof.

[2325] A RNAi agent comprising a first and a second strand, wherein the sequences of the first and/or second strands are the sequences of the first and/or second strands of: AD-39695.1 (SEQ ID NOs: 152 and 579), or a modified or unmodified variant thereof.

[2326] A RNAi agent comprising a first and a second strand, wherein the sequences of the first and/or second strands are the sequences of the first and/or second strands of: AD-39701.1 (SEQ ID NOs: 153 and 580), or a modified or unmodified variant thereof.

[2327] A RNAi agent comprising a first and a second strand, wherein the sequences of the first and/or second strands are the sequences of the first and/or second strands of: AD-39707.1 (SEQ ID NOs: 154 and 581), or a modified or unmodified variant thereof.

[2328] A RNAi agent comprising a first and a second strand, wherein the sequences of the first and/or second strands are the sequences of the first and/or second strands of: AD-39713.1 (SEQ ID NOs: 155 and 582), or a modified or unmodified variant thereof.

[2329] A RNAi agent comprising a first and a second strand, wherein the sequences of the first and/or second strands are the sequences of the first and/or second strands of: AD-39719.1 (SEQ ID NOs: 156 and 583), or a modified or unmodified variant thereof. A RNAi agent comprising a first and a second strand, wherein the sequences of the first and/or second strands are the sequences of the first and/or second strands of: AD-39725.1 (SEQ ID NOs: 157 and 584), or a modified or unmodified variant thereof.

[2330] A RNAi agent comprising a first and a second strand, wherein the sequences of the first and/or second strands are the sequences of the first and/or second strands of: AD-39684.1 (SEQ ID NOs: 158 and 585), or a modified or unmodified variant thereof.

[2331] A RNAi agent comprising a first and a second strand, wherein the sequences of the first and/or second strands are the sequences of the first and/or second strands of: AD-39690.1 (SEQ ID NOs: 159 and 586), or a modified or unmodified variant thereof.

[2332] A RNAi agent comprising a first and a second strand, wherein the sequences of the first and/or second strands are the sequences of the first and/or second strands of: AD-39696.1 (SEQ ID NOs: 160 and 587), or a modified or unmodified variant thereof.

[2333] A RNAi agent comprising a first and a second strand, wherein the sequences of the first and/or second strands are the sequences of the first and/or second strands of: AD-39702.1 (SEQ ID NOs: 161 and 588), or a modified or unmodified variant thereof.

[2334] A RNAi agent comprising a first and a second strand, wherein the sequences of the first and/or second strands are the sequences of the first and/or second strands of: AD-39708.1 (SEQ ID NOs: 162 and 589), or a modified or unmodified variant thereof.

[2335] A RNAi agent comprising a first and a second strand, wherein the sequences of the first and/or second strands are the sequences of the first and/or second strands of: AD-39714.1 (SEQ ID NOs: 163 and 590), or a modified or unmodified variant thereof.

[2336] A RNAi agent comprising a first and a second strand, wherein the sequences of the first and/or second strands are the sequences of the first and/or second strands of: AD-39720.1 (SEQ ID NOs: 164 and 591), or a modified or unmodified variant thereof.

[2337] A RNAi agent comprising a first and a second strand, wherein the sequences of the first and/or second strands are the sequences of the first and/or second strands of: AD-39726.1 (SEQ ID NOs: 165 and 592), or a modified or unmodified variant thereof.

[2338] A RNAi agent comprising a first and a second strand, wherein the sequences of the first and/or second strands are the sequences of the first and/or second strands of: AD-39685.1 (SEQ ID NOs: 166 and 593), or a modified or unmodified variant thereof.

[2339] A RNAi agent comprising a first and a second strand, wherein the sequences of the first and/or second strands are the sequences of the first and/or second strands of: AD-39691.1 (SEQ ID NOs: 167 and 594), or a modified or unmodified variant thereof.

[2340] A RNAi agent comprising a first and a second strand, wherein the sequences of the first and/or second strands are the sequences of the first and/or second strands of: AD-39697.1 (SEQ ID NOs: 168 and 595), or a modified or unmodified variant thereof.

[2341] A RNAi agent comprising a first and a second strand, wherein the sequences of the first and/or second strands are the sequences of the first and/or second strands of: AD-39703.1 (SEQ ID NOs: 169 and 596), or a modified or unmodified variant thereof.

[2342] A RNAi agent comprising a first and a second strand, wherein the sequences of the first and/or second strands are the sequences of the first and/or second strands of: AD-39709.1 (SEQ ID NOs: 170 and 597), or a modified or unmodified variant thereof.

[2343] A RNAi agent comprising a first and a second strand, wherein the sequences of the first and/or second strands are the sequences of the first and/or second strands of: AD-39715.1 (SEQ ID NOs: 171 and 598), or a modified or unmodified variant thereof.

[2344] A RNAi agent comprising a first and a second strand, wherein the sequences of the first and/or second strands are the sequences of the first and/or second strands of: AD-39721.1 (SEQ ID NOs: 172 and 599), or a modified or unmodified variant thereof.

[2345] A RNAi agent comprising a first and a second strand, wherein the sequences of the first and/or second strands are the sequences of the first and/or second strands of: AD-39727.1 (SEQ ID NOs: 173 and 600), or a modified or unmodified variant thereof.

[2346] A RNAi agent comprising a first and a second strand, wherein the sequences of the first and/or second strands are the sequences of the first and/or second strands of: AD-39686.1 (SEQ ID NOs: 174 and 601), or a modified or unmodified variant thereof.

[2347] A RNAi agent comprising a first and a second strand, wherein the sequences of the first and/or second strands are the sequences of the first and/or second strands of: AD-39692.1 (SEQ ID NOs: 175 and 602), or a modified or unmodified variant thereof.

[2348] A RNAi agent comprising a first and a second strand, wherein the sequences of the first and/or second strands are the sequences of the first and/or second strands of: AD-39698.1 (SEQ ID NOs: 176 and 603), or a modified or unmodified variant thereof.

[2349] A RNAi agent comprising a first and a second strand, wherein the sequences of the first and/or second strands are the sequences of the first and/or second strands of: AD-39704.1 (SEQ ID NOs: 177 and 604), or a modified or unmodified variant thereof.

[2350] A RNAi agent comprising a first and a second strand, wherein the sequences of the first and/or second strands are the sequences of the first and/or second strands of: AD-39710.1 (SEQ ID NOs: 178 and 605), or a modified or unmodified variant thereof.

[2351] A RNAi agent comprising a first and a second strand, wherein the sequences of the first and/or second strands are the sequences of the first and/or second strands of: AD-39716.1 (SEQ ID NOs: 179 and 606), or a modified or unmodified variant thereof.

[2352] A RNAi agent comprising a first and a second strand, wherein the sequences of the first and/or second strands are the sequences of the first and/or second strands of: AD-39722.1 (SEQ ID NOs: 180 and 607), or a modified or unmodified variant thereof.

[2353] A RNAi agent comprising a first and a second strand, wherein the sequences of the first and/or second strands are the sequences of the first and/or second strands of: AD-39728.1 (SEQ ID NOs: 181 and 608), or a modified or unmodified variant thereof.

[2354] A RNAi agent comprising a first and a second strand, wherein the sequences of the first and/or second strands are the sequences of the first and/or second strands of: AD-39687.1 (SEQ ID NOs: 182 and 609), or a modified or unmodified variant thereof.

[2355] A RNAi agent comprising a first and a second strand, wherein the sequences of the first and/or second strands are the sequences of the first and/or second strands of: AD-39693.1 (SEQ ID NOs: 183 and 610), or a modified or unmodified variant thereof.

[2356] A RNAi agent comprising a first and a second strand, wherein the sequences of the first and/or second strands are the sequences of the first and/or second strands of: AD-39699.1 (SEQ ID NOs: 184 and 611), or a modified or unmodified variant thereof.

[2357] A RNAi agent comprising a first and a second strand, wherein the sequences of the first and/or second strands are the sequences of the first and/or second strands of: AD-39705.1 (SEQ ID NOs: 185 and 612), or a modified or unmodified variant thereof.

[2358] A RNAi agent comprising a first and a second strand, wherein the sequences of the first and/or second strands are the sequences of the first and/or second strands of: AD-39711.1 (SEQ ID NOs: 186 and 613), or a modified or unmodified variant thereof.

[2359] A RNAi agent comprising a first and a second strand, wherein the sequences of the first and/or second strands are the sequences of the first and/or second strands of: AD-39717.1 (SEQ ID NOs: 187 and 614), or a modified or unmodified variant thereof.

[2360] A RNAi agent comprising a first and a second strand, wherein the sequences of the first and/or second strands are the sequences of the first and/or second strands of: AD-39723.1 (SEQ ID NOs: 188 and 615), or a modified or unmodified variant thereof.

[2361] A RNAi agent comprising a first and a second strand, wherein the sequences of the first and/or second strands are the sequences of the first and/or second strands of: AD-39729.1 (SEQ ID NOs: 189 and 616), or a modified or unmodified variant thereof.

[2362] A RNAi agent comprising a first and a second strand, wherein the sequences of the first and/or second strands are the sequences of the first and/or second strands of: AD-39688.1 (SEQ ID NOs: 190 and 617), or a modified or unmodified variant thereof.

[2363] A RNAi agent comprising a first and a second strand, wherein the sequences of the first and/or second strands are the sequences of the first and/or second strands of: AD-39694.1 (SEQ ID NOs: 191 and 618), or a modified or unmodified variant thereof.

[2364] A RNAi agent comprising a first and a second strand, wherein the sequences of the first and/or second strands are the sequences of the first and/or second strands of: AD-39700.1 (SEQ ID NOs: 192 and 619), or a modified or unmodified variant thereof.

[2365] A RNAi agent comprising a first and a second strand, wherein the sequences of the first and/or second strands are the sequences of the first and/or second strands of: AD-39706.1 (SEQ ID NOs: 193 and 620), or a modified or unmodified variant thereof.

[2366] A RNAi agent comprising a first and a second strand, wherein the sequences of the first and/or second strands are the sequences of the first and/or second strands of: AD-39712.1 (SEQ ID NOs: 194 and 621), or a modified or unmodified variant thereof.

[2367] A RNAi agent comprising a first and a second strand, wherein the sequences of the first and/or second strands are the sequences of the first and/or second strands of: AD-39718.1 (SEQ ID NOs: 195 and 622), or a modified or unmodified variant thereof.

[2368] A RNAi agent comprising a first and a second strand, wherein the sequences of the first and/or second strands are the sequences of the first and/or second strands of: AD-39724.1 (SEQ ID NOs: 196 and 623), or a modified or unmodified variant thereof. A RNAi agent comprising a first and a second strand, wherein the sequences of the first and/or second strands are the sequences of the first and/or second strands of: AD-39730.1 (SEQ ID NOs: 197 and 624), or a modified or unmodified variant thereof.

[2369] A RNAi agent comprising a first and a second strand, wherein the sequences of the first and/or second strands are the sequences of the first and/or second strands of: AD-39736.1 (SEQ ID NOs: 198 and 625), or a modified or unmodified variant thereof.

[2370] A RNAi agent comprising a first and a second strand, wherein the sequences of the first and/or second strands are the sequences of the first and/or second strands of: AD-39742.1 (SEQ ID NOs: 199 and 626), or a modified or unmodified variant thereof.

[2371] A RNAi agent comprising a first and a second strand, wherein the sequences of the first and/or second strands are the sequences of the first and/or second strands of: AD-39748.1 (SEQ ID NOs: 200 and 627), or a modified or unmodified variant thereof.

[2372] A RNAi agent comprising a first and a second strand, wherein the sequences of the first and/or second strands are the sequences of the first and/or second strands of: AD-39754.1 (SEQ ID NOs: 201 and 628), or a modified or unmodified variant thereof.

[2373] A RNAi agent comprising a first and a second strand, wherein the sequences of the first and/or second strands are the sequences of the first and/or second strands of: AD-39760.1 (SEQ ID NOs: 202 and 629), or a modified or unmodified variant thereof.

[2374] A RNAi agent comprising a first and a second strand, wherein the sequences of the first and/or second strands are the sequences of the first and/or second strands of: AD-39766.1 (SEQ ID NOs: 203 and 630), or a modified or unmodified variant thereof.

[2375] A RNAi agent comprising a first and a second strand, wherein the sequences of the first and/or second strands are the sequences of the first and/or second strands of: AD-39772.1 (SEQ ID NOs: 204 and 631), or a modified or unmodified variant thereof.

[2376] A RNAi agent comprising a first and a second strand, wherein the sequences of the first and/or second strands are the sequences of the first and/or second strands of: AD-39731.1 (SEQ ID NOs: 205 and 632), or a modified or unmodified variant thereof.

[2377] A RNAi agent comprising a first and a second strand, wherein the sequences of the first and/or second strands are the sequences of the first and/or second strands of: AD-39737.1 (SEQ ID NOs: 206 and 633), or a modified or unmodified variant thereof.

[2378] A RNAi agent comprising a first and a second strand, wherein the sequences of the first and/or second strands are the sequences of the first and/or second strands of: AD-39743.1 (SEQ ID NOs: 207 and 634), or a modified or unmodified variant thereof.

[2379] A RNAi agent comprising a first and a second strand, wherein the sequences of the first and/or second strands are the sequences of the first and/or second strands of: AD-39749.1 (SEQ ID NOs: 208 and 635), or a modified or unmodified variant thereof.

[2380] A RNAi agent comprising a first and a second strand, wherein the sequences of the first and/or second strands are the sequences of the first and/or second strands of: AD-39755.1 (SEQ ID NOs: 209 and 636), or a modified or unmodified variant thereof.

[2381] A RNAi agent comprising a first and a second strand, wherein the sequences of the first and/or second strands are the sequences of the first and/or second strands of: AD-39761.1 (SEQ ID NOs: 210 and 637), or a modified or unmodified variant thereof.

[2382] A RNAi agent comprising a first and a second strand, wherein the sequences of the first and/or second strands are the sequences of the first and/or second strands of: AD-39767.1 (SEQ ID NOs: 211 and 638), or a modified or unmodified variant thereof.

[2383] A RNAi agent comprising a first and a second strand, wherein the sequences of the first and/or second strands are the sequences of the first and/or second strands of: AD-39773.1 (SEQ ID NOs: 212 and 639), or a modified or unmodified variant thereof.

[2384] A RNAi agent comprising a first and a second strand, wherein the sequences of the first and/or second strands are the sequences of the first and/or second strands of: AD-39732.1 (SEQ ID NOs: 213 and 640), or a modified or unmodified variant thereof.

[2385] A RNAi agent comprising a first and a second strand, wherein the sequences of the first and/or second strands are the sequences of the first and/or second strands of: AD-39738.1 (SEQ ID NOs: 214 and 641), or a modified or unmodified variant thereof.

[2386] A RNAi agent comprising a first and a second strand, wherein the sequences of the first and/or second strands are the sequences of the first and/or second strands of: AD-39744.1 (SEQ ID NOs: 215 and 642), or a modified or unmodified variant thereof.

[2387] A RNAi agent comprising a first and a second strand, wherein the sequences of the first and/or second strands are the sequences of the first and/or second strands of: AD-39750.1 (SEQ ID NOs: 216 and 643), or a modified or unmodified variant thereof.

[2388] A RNAi agent comprising a first and a second strand, wherein the sequences of the first and/or second strands are the sequences of the first and/or second strands of: AD-39756.1 (SEQ ID NOs: 217 and 644), or a modified or unmodified variant thereof.

[2389] A RNAi agent comprising a first and a second strand, wherein the sequences of the first and/or second strands are the sequences of the first and/or second strands of: AD-39762.1 (SEQ ID NOs: 218 and 645), or a modified or unmodified variant thereof.

[2390] A RNAi agent comprising a first and a second strand, wherein the sequences of the first and/or second strands are the sequences of the first and/or second strands of: AD-39768.1 (SEQ ID NOs: 219 and 646), or a modified or unmodified variant thereof.

[2391] A RNAi agent comprising a first and a second strand, wherein the sequences of the first and/or second strands are the sequences of the first and/or second strands of: AD-39774.1 (SEQ ID NOs: 220 and 647), or a modified or unmodified variant thereof.

[2392] A RNAi agent comprising a first and a second strand, wherein the sequences of the first and/or second strands are the sequences of the first and/or second strands of: AD-39733.1 (SEQ ID NOs: 221 and 648), or a modified or unmodified variant thereof.

[2393] A RNAi agent comprising a first and a second strand, wherein the sequences of the first and/or second strands are the sequences of the first and/or second strands of: AD-39739.1 (SEQ ID NOs: 222 and 649), or a modified or unmodified variant thereof.

[2394] A RNAi agent comprising a first and a second strand, wherein the sequences of the first and/or second strands are the sequences of the first and/or second strands of: AD-39745.1 (SEQ ID NOs: 223 and 650), or a modified or unmodified variant thereof.

[2395] A RNAi agent comprising a first and a second strand, wherein the sequences of the first and/or second strands are the sequences of the first and/or second strands of: AD-39751.1 (SEQ ID NOs: 224 and 651), or a modified or unmodified variant thereof.

[2396] A RNAi agent comprising a first and a second strand, wherein the sequences of the first and/or second strands are the sequences of the first and/or second strands of: AD-39757.1 (SEQ ID NOs: 225 and 652), or a modified or unmodified variant thereof.

[2397] A RNAi agent comprising a first and a second strand, wherein the sequences of the first and/or second strands are the sequences of the first and/or second strands of: AD-39763.1 (SEQ ID NOs: 226 and 653), or a modified or unmodified variant thereof.

[2398] A RNAi agent comprising a first and a second strand, wherein the sequences of the first and/or second strands are the sequences of the first and/or second strands of: AD-39769.1 (SEQ ID NOs: 227 and 654), or a modified or unmodified variant thereof.

[2399] A RNAi agent comprising a first and a second strand, wherein the sequences of the first and/or second strands are the sequences of the first and/or second strands of: AD-39775.1 (SEQ ID NOs: 228 and 655), or a modified or unmodified variant thereof.

[2400] A RNAi agent comprising a first and a second strand, wherein the sequences of the first and/or second strands are the sequences of the first and/or second strands of: AD-39734.1 (SEQ ID NOs: 229 and 656), or a modified or unmodified variant thereof.

[2401] A RNAi agent comprising a first and a second strand, wherein the sequences of the first and/or second strands are the sequences of the first and/or second strands of: AD-39740.1 (SEQ ID NOs: 230 and 657), or a modified or unmodified variant thereof.

[2402] A RNAi agent comprising a first and a second strand, wherein the sequences of the first and/or second strands are the sequences of the first and/or second strands of: AD-39746.1 (SEQ ID NOs: 231 and 658), or a modified or unmodified variant thereof.

[2403] A RNAi agent comprising a first and a second strand, wherein the sequences of the first and/or second strands are the sequences of the first and/or second strands of: AD-39752.1 (SEQ ID NOs: 232 and 659), or a modified or unmodified variant thereof.

[2404] A RNAi agent comprising a first and a second strand, wherein the sequences of the first and/or second strands are the sequences of the first and/or second strands of: AD-39758.1 (SEQ ID NOs: 233 and 660), or a modified or unmodified variant thereof.

[2405] A RNAi agent comprising a first and a second strand, wherein the sequences of the first and/or second strands are the sequences of the first and/or second strands of: AD-39764.1 (SEQ ID NOs: 234 and 661), or a modified or unmodified variant thereof.

[2406] A RNAi agent comprising a first and a second strand, wherein the sequences of the first and/or second strands are the sequences of the first and/or second strands of: AD-39770.1 (SEQ ID NOs: 235 and 662), or a modified or unmodified variant thereof.

[2407] A RNAi agent comprising a first and a second strand, wherein the sequences of the first and/or second strands are the sequences of the first and/or second strands of: AD-39776.1 (SEQ ID NOs: 236 and 663), or a modified or unmodified variant thereof. A RNAi agent comprising a first and a second strand, wherein the sequences of the first and/or second strands are the sequences of the first and/or second strands of: AD-39735.1 (SEQ ID NOs: 237 and 664), or a modified or unmodified variant thereof.

[2408] A RNAi agent comprising a first and a second strand, wherein the sequences of the first and/or second strands are the sequences of the first and/or second strands of: AD-39741.1 (SEQ ID NOs: 238 and 665), or a modified or unmodified variant thereof.

[2409] A RNAi agent comprising a first and a second strand, wherein the sequences of the first and/or second strands are the sequences of the first and/or second strands of: AD-39747.1 (SEQ ID NOs: 239 and 666), or a modified or unmodified variant thereof.

[2410] A RNAi agent comprising a first and a second strand, wherein the sequences of the first and/or second strands are the sequences of the first and/or second strands of: AD-39753.1 (SEQ ID NOs: 240 and 667), or a modified or unmodified variant thereof.

[2411] A RNAi agent comprising a first and a second strand, wherein the sequences of the first and/or second strands are the sequences of the first and/or second strands of: AD-39759.1 (SEQ ID NOs: 241 and 668), or a modified or unmodified variant thereof.

[2412] A RNAi agent comprising a first and a second strand, wherein the sequences of the first and/or second strands are the sequences of the first and/or second strands of: AD-39765.1 (SEQ ID NOs: 242 and 669), or a modified or unmodified variant thereof.

[2413] A RNAi agent comprising a first and a second strand, wherein the sequences of the first and/or second strands are the sequences of the first and/or second strands of: AD-39771.1 (SEQ ID NOs: 243 and 670), or a modified or unmodified variant thereof.

[2414] A RNAi agent comprising a first and a second strand, wherein the sequences of the first and/or second strands are the sequences of the first and/or second strands of: AD-39778.1 (SEQ ID NOs: 244 and 671), or a modified or unmodified variant thereof.

[2415] A RNAi agent comprising a first and a second strand, wherein the sequences of the first and/or second strands are the sequences of the first and/or second strands of: AD-39784.1 (SEQ ID NOs: 245 and 672), or a modified or unmodified variant thereof.

[2416] A RNAi agent comprising a first and a second strand, wherein the sequences of the first and/or second strands are the sequences of the first and/or second strands of: AD-39790.1 (SEQ ID NOs: 246 and 673), or a modified or unmodified variant thereof.

[2417] A RNAi agent comprising a first and a second strand, wherein the sequences of the first and/or second strands are the sequences of the first and/or second strands of: AD-39796.1 (SEQ ID NOs: 247 and 674), or a modified or unmodified variant thereof.

[2418] A RNAi agent comprising a first and a second strand, wherein the sequences of the first and/or second strands are the sequences of the first and/or second strands of: AD-39802.1 (SEQ ID NOs: 248 and 675), or a modified or unmodified variant thereof.

[2419] A RNAi agent comprising a first and a second strand, wherein the sequences of the first and/or second strands are the sequences of the first and/or second strands of: AD-39808.1 (SEQ ID NOs: 249 and 676), or a modified or unmodified variant thereof.

[2420] A RNAi agent comprising a first and a second strand, wherein the sequences of the first and/or second strands are the sequences of the first and/or second strands of: AD-39814.1 (SEQ ID NOs: 250 and 677), or a modified or unmodified variant thereof.

[2421] A RNAi agent comprising a first and a second strand, wherein the sequences of the first and/or second strands are the sequences of the first and/or second strands of: AD-39820.1 (SEQ ID NOs: 251 and 678), or a modified or unmodified variant thereof.

[2422] A RNAi agent comprising a first and a second strand, wherein the sequences of the first and/or second strands are the sequences of the first and/or second strands of: AD-39779.1 (SEQ ID NOs: 252 and 679), or a modified or unmodified variant thereof.

[2423] A RNAi agent comprising a first and a second strand, wherein the sequences of the first and/or second strands are the sequences of the first and/or second strands of: AD-39785.1 (SEQ ID NOs: 253 and 680), or a modified or unmodified variant thereof.

[2424] A RNAi agent comprising a first and a second strand, wherein the sequences of the first and/or second strands are the sequences of the first and/or second strands of: AD-39791.1 (SEQ ID NOs: 254 and 681), or a modified or unmodified variant thereof.

[2425] A RNAi agent comprising a first and a second strand, wherein the sequences of the first and/or second strands are the sequences of the first and/or second strands of: AD-39797.1 (SEQ ID NOs: 255 and 682), or a modified or unmodified variant thereof.

[2426] A RNAi agent comprising a first and a second strand, wherein the sequences of the first and/or second strands are the sequences of the first and/or second strands of: AD-39803.1 (SEQ ID NOs: 256 and 683), or a modified or unmodified variant thereof.

[2427] A RNAi agent comprising a first and a second strand, wherein the sequences of the first and/or second strands are the sequences of the first and/or second strands of: AD-39809.1 (SEQ ID NOs: 257 and 684), or a modified or unmodified variant thereof.

[2428] A RNAi agent comprising a first and a second strand, wherein the sequences of the first and/or second strands are the sequences of the first and/or second strands of: AD-39815.1 (SEQ ID NOs: 258 and 685), or a modified or unmodified variant thereof.

[2429] A RNAi agent comprising a first and a second strand, wherein the sequences of the first and/or second strands are the sequences of the first and/or second strands of: AD-39821.1 (SEQ ID NOs: 259 and 686), or a modified or unmodified variant thereof.

[2430] A RNAi agent comprising a first and a second strand, wherein the sequences of the first and/or second strands are the sequences of the first and/or second strands of: AD-39780.1 (SEQ ID NOs: 260 and 687), or a modified or unmodified variant thereof.

[2431] A RNAi agent comprising a first and a second strand, wherein the sequences of the first and/or second strands are the sequences of the first and/or second strands of: AD-39786.1 (SEQ ID NOs: 261 and 688), or a modified or unmodified variant thereof.

[2432] A RNAi agent comprising a first and a second strand, wherein the sequences of the first and/or second strands are the sequences of the first and/or second strands of: AD-39792.1 (SEQ ID NOs: 262 and 689), or a modified or unmodified variant thereof.

[2433] A RNAi agent comprising a first and a second strand, wherein the sequences of the first and/or second strands are the sequences of the first and/or second strands of: AD-39798.1 (SEQ ID NOs: 263 and 690), or a modified or unmodified variant thereof.

[2434] A RNAi agent comprising a first and a second strand, wherein the sequences of the first and/or second strands are the sequences of the first and/or second strands of: AD-39804.1 (SEQ ID NOs: 264 and 691), or a modified or unmodified variant thereof.

[2435] A RNAi agent comprising a first and a second strand, wherein the sequences of the first and/or second strands are the sequences of the first and/or second strands of: AD-39810.1 (SEQ ID NOs: 265 and 692), or a modified or unmodified variant thereof.

[2436] A RNAi agent comprising a first and a second strand, wherein the sequences of the first and/or second strands are the sequences of the first and/or second strands of: AD-39816.1 (SEQ ID NOs: 266 and 693), or a modified or unmodified variant thereof.

[2437] A RNAi agent comprising a first and a second strand, wherein the sequences of the first and/or second strands are the sequences of the first and/or second strands of: AD-39822.1 (SEQ ID NOs: 267 and 694), or a modified or unmodified variant thereof.

[2438] A RNAi agent comprising a first and a second strand, wherein the sequences of the first and/or second strands are the sequences of the first and/or second strands of: AD-39781.1 (SEQ ID NOs: 268 and 695), or a modified or unmodified variant thereof.

[2439] A RNAi agent comprising a first and a second strand, wherein the sequences of the first and/or second strands are the sequences of the first and/or second strands of: AD-39787.1 (SEQ ID NOs: 269 and 696), or a modified or unmodified variant thereof.

[2440] A RNAi agent comprising a first and a second strand, wherein the sequences of the first and/or second strands are the sequences of the first and/or second strands of: AD-39793.1 (SEQ ID NOs: 270 and 697), or a modified or unmodified variant thereof.

[2441] A RNAi agent comprising a first and a second strand, wherein the sequences of the first and/or second strands are the sequences of the first and/or second strands of: AD-39799.1 (SEQ ID NOs: 271 and 698), or a modified or unmodified variant thereof.

[2442] A RNAi agent comprising a first and a second strand, wherein the sequences of the first and/or second strands are the sequences of the first and/or second strands of: AD-39805.1 (SEQ ID NOs: 272 and 699), or a modified or unmodified variant thereof.

[2443] A RNAi agent comprising a first and a second strand, wherein the sequences of the first and/or second strands are the sequences of the first and/or second strands of: AD-39811.1 (SEQ ID NOs: 273 and 700), or a modified or unmodified variant thereof.

[2444] A RNAi agent comprising a first and a second strand, wherein the sequences of the first and/or second strands are the sequences of the first and/or second strands of: AD-39817.1 (SEQ ID NOs: 274 and 701), or a modified or unmodified variant thereof.

[2445] A RNAi agent comprising a first and a second strand, wherein the sequences of the first and/or second strands are the sequences of the first and/or second strands of: AD-39823.1 (SEQ ID NOs: 275 and 702), or a modified or unmodified variant thereof.

[2446] A RNAi agent comprising a first and a second strand, wherein the sequences of the first and/or second strands are the sequences of the first and/or second strands of: AD-39782.1 (SEQ ID NOs: 276 and 703), or a modified or unmodified variant thereof. A RNAi agent comprising a first and a second strand, wherein the sequences of the first and/or second strands are the sequences of the first and/or second strands of: AD-39788.1 (SEQ ID NOs: 277 and 704), or a modified or unmodified variant thereof.

[2447] A RNAi agent comprising a first and a second strand, wherein the sequences of the first and/or second strands are the sequences of the first and/or second strands of: AD-39794.1 (SEQ ID NOs: 278 and 705), or a modified or unmodified variant thereof.

[2448] A RNAi agent comprising a first and a second strand, wherein the sequences of the first and/or second strands are the sequences of the first and/or second strands of: AD-39800.1 (SEQ ID NOs: 279 and 706), or a modified or unmodified variant thereof.

[2449] A RNAi agent comprising a first and a second strand, wherein the sequences of the first and/or second strands are the sequences of the first and/or second strands of: AD-39806.1 (SEQ ID NOs: 280 and 707), or a modified or unmodified variant thereof.

[2450] A RNAi agent comprising a first and a second strand, wherein the sequences of the first and/or second strands are the sequences of the first and/or second strands of: AD-39812.1 (SEQ ID NOs: 281 and 708), or a modified or unmodified variant thereof.

[2451] A RNAi agent comprising a first and a second strand, wherein the sequences of the first and/or second strands are the sequences of the first and/or second strands of: AD-39818.1 (SEQ ID NOs: 282 and 709), or a modified or unmodified variant thereof.

[2452] A RNAi agent comprising a first and a second strand, wherein the sequences of the first and/or second strands are the sequences of the first and/or second strands of: AD-39824.1 (SEQ ID NOs: 283 and 710), or a modified or unmodified variant thereof.

[2453] A RNAi agent comprising a first and a second strand, wherein the sequences of the first and/or second strands are the sequences of the first and/or second strands of: AD-39783.1 (SEQ ID NOs: 284 and 711), or a modified or unmodified variant thereof.

[2454] A RNAi agent comprising a first and a second strand, wherein the sequences of the first and/or second strands are the sequences of the first and/or second strands of: AD-39789.1 (SEQ ID NOs: 285 and 712), or a modified or unmodified variant thereof.

[2455] A RNAi agent comprising a first and a second strand, wherein the sequences of the first and/or second strands are the sequences of the first and/or second strands of: AD-39795.1 (SEQ ID NOs: 286 and 713), or a modified or unmodified variant thereof.

[2456] A RNAi agent comprising a first and a second strand, wherein the sequences of the first and/or second strands are the sequences of the first and/or second strands of: AD-39801.1 (SEQ ID NOs: 287 and 714), or a modified or unmodified variant thereof.

[2457] A RNAi agent comprising a first and a second strand, wherein the sequences of the first and/or second strands are the sequences of the first and/or second strands of: AD-39807.1 (SEQ ID NOs: 288 and 715), or a modified or unmodified variant thereof.

[2458] A RNAi agent comprising a first and a second strand, wherein the sequences of the first and/or second strands are the sequences of the first and/or second strands of: AD-39813.1 (SEQ ID NOs: 289 and 716), or a modified or unmodified variant thereof.

[2459] A RNAi agent comprising a first and a second strand, wherein the sequences of the first and/or second strands are the sequences of the first and/or second strands of: AD-39819.1 (SEQ ID NOs: 290 and 717), or a modified or unmodified variant thereof.

[2460] A RNAi agent comprising a first and a second strand, wherein the sequences of the first and/or second strands are the sequences of the first and/or second strands of: AD-39825.1 (SEQ ID NOs: 291 and 718), or a modified or unmodified variant thereof.

[2461] A RNAi agent comprising a first and a second strand, wherein the sequences of the first and/or second strands are the sequences of the first and/or second strands of: AD-39831.1 (SEQ ID NOs: 292 and 719), or a modified or unmodified variant thereof.

[2462] A RNAi agent comprising a first and a second strand, wherein the sequences of the first and/or second strands are the sequences of the first and/or second strands of: AD-39837.1 (SEQ ID NOs: 293 and 720), or a modified or unmodified variant thereof.

[2463] A RNAi agent comprising a first and a second strand, wherein the sequences of the first and/or second strands are the sequences of the first and/or second strands of: AD-39843.1 (SEQ ID NOs: 294 and 721), or a modified or unmodified variant thereof.

[2464] A RNAi agent comprising a first and a second strand, wherein the sequences of the first and/or second strands are the sequences of the first and/or second strands of: AD-39849.1 (SEQ ID NOs: 295 and 722), or a modified or unmodified variant thereof.

[2465] A RNAi agent comprising a first and a second strand, wherein the sequences of the first and/or second strands are the sequences of the first and/or second strands of: AD-39855.1 (SEQ ID NOs: 296 and 723), or a modified or unmodified variant thereof.

[2466] A RNAi agent comprising a first and a second strand, wherein the sequences of the first and/or second strands are the sequences of the first and/or second strands of: AD-39861.1 (SEQ ID NOs: 297 and 724), or a modified or unmodified variant thereof.

[2467] A RNAi agent comprising a first and a second strand, wherein the sequences of the first and/or second strands are the sequences of the first and/or second strands of: AD-39867.1 (SEQ ID NOs: 298 and 725), or a modified or unmodified variant thereof.

[2468] A RNAi agent comprising a first and a second strand, wherein the sequences of the first and/or second strands are the sequences of the first and/or second strands of: AD-39826.1 (SEQ ID NOs: 299 and 726), or a modified or unmodified variant thereof.

[2469] A RNAi agent comprising a first and a second strand, wherein the sequences of the first and/or second strands are the sequences of the first and/or second strands of: AD-39832.1 (SEQ ID NOs: 300 and 727), or a modified or unmodified variant thereof.

[2470] A RNAi agent comprising a first and a second strand, wherein the sequences of the first and/or second strands are the sequences of the first and/or second strands of: AD-39838.1 (SEQ ID NOs: 301 and 728), or a modified or unmodified variant thereof.

[2471] A RNAi agent comprising a first and a second strand, wherein the sequences of the first and/or second strands are the sequences of the first and/or second strands of: AD-39844.1 (SEQ ID NOs: 302 and 729), or a modified or unmodified variant thereof.

[2472] A RNAi agent comprising a first and a second strand, wherein the sequences of the first and/or second strands are the sequences of the first and/or second strands of: AD-39850.1 (SEQ ID NOs: 303 and 730), or a modified or unmodified variant thereof.

[2473] A RNAi agent comprising a first and a second strand, wherein the sequences of the first and/or second strands are the sequences of the first and/or second strands of: AD-39856.1 (SEQ ID NOs: 304 and 731), or a modified or unmodified variant thereof.

[2474] A RNAi agent comprising a first and a second strand, wherein the sequences of the first and/or second strands are the sequences of the first and/or second strands of: AD-39862.1 (SEQ ID NOs: 305 and 732), or a modified or unmodified variant thereof.

[2475] A RNAi agent comprising a first and a second strand, wherein the sequences of the first and/or second strands are the sequences of the first and/or second strands of: AD-39868.1 (SEQ ID NOs: 306 and 733), or a modified or unmodified variant thereof.

[2476] A RNAi agent comprising a first and a second strand, wherein the sequences of the first and/or second strands are the sequences of the first and/or second strands of: AD-39827.1 (SEQ ID NOs: 307 and 734), or a modified or unmodified variant thereof.

[2477] A RNAi agent comprising a first and a second strand, wherein the sequences of the first and/or second strands are the sequences of the first and/or second strands of: AD-39833.1 (SEQ ID NOs: 308 and 735), or a modified or unmodified variant thereof.

[2478] A RNAi agent comprising a first and a second strand, wherein the sequences of the first and/or second strands are the sequences of the first and/or second strands of: AD-39839.1 (SEQ ID NOs: 309 and 736), or a modified or unmodified variant thereof.

[2479] A RNAi agent comprising a first and a second strand, wherein the sequences of the first and/or second strands are the sequences of the first and/or second strands of: AD-39845.1 (SEQ ID NOs: 310 and 737), or a modified or unmodified variant thereof.

[2480] A RNAi agent comprising a first and a second strand, wherein the sequences of the first and/or second strands are the sequences of the first and/or second strands of: AD-39851.1 (SEQ ID NOs: 311 and 738), or a modified or unmodified variant thereof.

[2481] A RNAi agent comprising a first and a second strand, wherein the sequences of the first and/or second strands are the sequences of the first and/or second strands of: AD-39857.1 (SEQ ID NOs: 312 and 739), or a modified or unmodified variant thereof.

[2482] A RNAi agent comprising a first and a second strand, wherein the sequences of the first and/or second strands are the sequences of the first and/or second strands of: AD-39863.1 (SEQ ID NOs: 313 and 740), or a modified or unmodified variant thereof.

[2483] A RNAi agent comprising a first and a second strand, wherein the sequences of the first and/or second strands are the sequences of the first and/or second strands of: AD-39869.1 (SEQ ID NOs: 314 and 741), or a modified or unmodified variant thereof.

[2484] A RNAi agent comprising a first and a second strand, wherein the sequences of the first and/or second strands are the sequences of the first and/or second strands of: AD-39828.1 (SEQ ID NOs: 315 and 742), or a modified or unmodified variant thereof.

[2485] A RNAi agent comprising a first and a second strand, wherein the sequences of the first and/or second strands are the sequences of the first and/or second strands of: AD-39834.1 (SEQ ID NOs: 316 and 743), or a modified or unmodified variant thereof. A RNAi agent comprising a first and a second strand, wherein the sequences of the first and/or second strands are the sequences of the first and/or second strands of: AD-39840.1 (SEQ ID NOs: 317 and 744), or a modified or unmodified variant thereof.

[2486] A RNAi agent comprising a first and a second strand, wherein the sequences of the first and/or second strands are the sequences of the first and/or second strands of: AD-39846.1 (SEQ ID NOs: 318 and 745), or a modified or unmodified variant thereof.

[2487] A RNAi agent comprising a first and a second strand, wherein the sequences of the first and/or second strands are the sequences of the first and/or second strands of: AD-39852.1 (SEQ ID NOs: 319 and 746), or a modified or unmodified variant thereof.

[2488] A RNAi agent comprising a first and a second strand, wherein the sequences of the first and/or second strands are the sequences of the first and/or second strands of: AD-39858.1 (SEQ ID NOs: 320 and 747), or a modified or unmodified variant thereof.

[2489] A RNAi agent comprising a first and a second strand, wherein the sequences of the first and/or second strands are the sequences of the first and/or second strands of: AD-39864.1 (SEQ ID NOs: 321 and 748), or a modified or unmodified variant thereof.

[2490] A RNAi agent comprising a first and a second strand, wherein the sequences of the first and/or second strands are the sequences of the first and/or second strands of: AD-39870.1 (SEQ ID NOs: 322 and 749), or a modified or unmodified variant thereof.

[2491] A RNAi agent comprising a first and a second strand, wherein the sequences of the first and/or second strands are the sequences of the first and/or second strands of: AD-39829.1 (SEQ ID NOs: 323 and 750), or a modified or unmodified variant thereof.

[2492] A RNAi agent comprising a first and a second strand, wherein the sequences of the first and/or second strands are the sequences of the first and/or second strands of: AD-39835.1 (SEQ ID NOs: 324 and 751), or a modified or unmodified variant thereof.

[2493] A RNAi agent comprising a first and a second strand, wherein the sequences of the first and/or second strands are the sequences of the first and/or second strands of: AD-39841.1 (SEQ ID NOs: 325 and 752), or a modified or unmodified variant thereof.

[2494] A RNAi agent comprising a first and a second strand, wherein the sequences of the first and/or second strands are the sequences of the first and/or second strands of: AD-39853.1 (SEQ ID NOs: 326 and 753), or a modified or unmodified variant thereof.

[2495] A RNAi agent comprising a first and a second strand, wherein the sequences of the first and/or second strands are the sequences of the first and/or second strands of: AD-39859.1 (SEQ ID NOs: 327 and 754), or a modified or unmodified variant thereof.

[2496] A RNAi agent comprising a first and a second strand, wherein the sequences of the first and/or second strands are the sequences of the first and/or second strands of: AD-39865.1 (SEQ ID NOs: 328 and 755), or a modified or unmodified variant thereof.

[2497] A RNAi agent comprising a first and a second strand, wherein the sequences of the first and/or second strands are the sequences of the first and/or second strands of: AD-39871.1 (SEQ ID NOs: 329 and 756), or a modified or unmodified variant thereof.

[2498] A RNAi agent comprising a first and a second strand, wherein the sequences of the first and/or second strands are the sequences of the first and/or second strands of: AD-39830.1 (SEQ ID NOs: 330 and 757), or a modified or unmodified variant thereof.

[2499] A RNAi agent comprising a first and a second strand, wherein the sequences of the first and/or second strands are the sequences of the first and/or second strands of: AD-39836.1 (SEQ ID NOs: 331 and 758), or a modified or unmodified variant thereof.

[2500] A RNAi agent comprising a first and a second strand, wherein the sequences of the first and/or second strands are the sequences of the first and/or second strands of: AD-39842.1 (SEQ ID NOs: 332 and 759), or a modified or unmodified variant thereof.

[2501] A RNAi agent comprising a first and a second strand, wherein the sequences of the first and/or second strands are the sequences of the first and/or second strands of: AD-39848.1 (SEQ ID NOs: 333 and 760), or a modified or unmodified variant thereof.

[2502] A RNAi agent comprising a first and a second strand, wherein the sequences of the first and/or second strands are the sequences of the first and/or second strands of: AD-39854.1 (SEQ ID NOs: 334 and 761), or a modified or unmodified variant thereof.

[2503] A RNAi agent comprising a first and a second strand, wherein the sequences of the first and/or second strands are the sequences of the first and/or second strands of: AD-39860.1 (SEQ ID NOs: 335 and 762), or a modified or unmodified variant thereof.

[2504] A RNAi agent comprising a first and a second strand, wherein the sequences of the first and/or second strands are the sequences of the first and/or second strands of: AD-39866.1 (SEQ ID NOs: 336 and 763), or a modified or unmodified variant thereof.

[2505] A RNAi agent comprising a first and a second strand, wherein the sequences of the first and/or second strands are the sequences of the first and/or second strands of: AD-39992.1 (SEQ ID NOs: 337 and 764), or a modified or unmodified variant thereof.

[2506] A RNAi agent comprising a first and a second strand, wherein the sequences of the first and/or second strands are the sequences of the first and/or second strands of: AD-39998.1 (SEQ ID NOs: 338 and 765), or a modified or unmodified variant thereof.

[2507] A RNAi agent comprising a first and a second strand, wherein the sequences of the first and/or second strands are the sequences of the first and/or second strands of: AD-40004.1 (SEQ ID NOs: 339 and 766), or a modified or unmodified variant thereof.

[2508] A RNAi agent comprising a first and a second strand, wherein the sequences of the first and/or second strands are the sequences of the first and/or second strands of: AD-40010.1 (SEQ ID NOs: 340 and 767), or a modified or unmodified variant thereof.

[2509] A RNAi agent comprising a first and a second strand, wherein the sequences of the first and/or second strands are the sequences of the first and/or second strands of: AD-40016.1 (SEQ ID NOs: 341 and 768), or a modified or unmodified variant thereof.

[2510] A RNAi agent comprising a first and a second strand, wherein the sequences of the first and/or second strands are the sequences of the first and/or second strands of: AD-40022.1 (SEQ ID NOs: 342 and 769), or a modified or unmodified variant thereof.

[2511] A RNAi agent comprising a first and a second strand, wherein the sequences of the first and/or second strands are the sequences of the first and/or second strands of: AD-40028.1 (SEQ ID NOs: 343 and 770), or a modified or unmodified variant thereof.

[2512] A RNAi agent comprising a first and a second strand, wherein the sequences of the first and/or second strands are the sequences of the first and/or second strands of: AD-40034.1 (SEQ ID NOs: 344 and 771), or a modified or unmodified variant thereof.

[2513] A RNAi agent comprising a first and a second strand, wherein the sequences of the first and/or second strands are the sequences of the first and/or second strands of: AD-39999.1 (SEQ ID NOs: 345 and 772), or a modified or unmodified variant thereof.

[2514] A RNAi agent comprising a first and a second strand, wherein the sequences of the first and/or second strands are the sequences of the first and/or second strands of: AD-40005.1 (SEQ ID NOs: 346 and 773), or a modified or unmodified variant thereof.

[2515] A RNAi agent comprising a first and a second strand, wherein the sequences of the first and/or second strands are the sequences of the first and/or second strands of: AD-40011.1 (SEQ ID NOs: 347 and 774), or a modified or unmodified variant thereof.

[2516] A RNAi agent comprising a first and a second strand, wherein the sequences of the first and/or second strands are the sequences of the first and/or second strands of: AD-40017.1 (SEQ ID NOs: 348 and 775), or a modified or unmodified variant thereof.

[2517] A RNAi agent comprising a first and a second strand, wherein the sequences of the first and/or second strands are the sequences of the first and/or second strands of: AD-40029.1 (SEQ ID NOs: 349 and 776), or a modified or unmodified variant thereof.

[2518] A RNAi agent comprising a first and a second strand, wherein the sequences of the first and/or second strands are the sequences of the first and/or second strands of: AD-40035.1 (SEQ ID NOs: 350 and 777), or a modified or unmodified variant thereof.

[2519] A RNAi agent comprising a first and a second strand, wherein the sequences of the first and/or second strands are the sequences of the first and/or second strands of: AD-39994.1 (SEQ ID NOs: 351 and 778), or a modified or unmodified variant thereof.

[2520] A RNAi agent comprising a first and a second strand, wherein the sequences of the first and/or second strands are the sequences of the first and/or second strands of: AD-40000.1 (SEQ ID NOs: 352 and 779), or a modified or unmodified variant thereof.

[2521] A RNAi agent comprising a first and a second strand, wherein the sequences of the first and/or second strands are the sequences of the first and/or second strands of: AD-40006.1 (SEQ ID NOs: 353 and 780), or a modified or unmodified variant thereof.

[2522] A RNAi agent comprising a first and a second strand, wherein the sequences of the first and/or second strands are the sequences of the first and/or second strands of: AD-40012.1 (SEQ ID NOs: 354 and 781), or a modified or unmodified variant thereof.

[2523] A RNAi agent comprising a first and a second strand, wherein the sequences of the first and/or second strands are the sequences of the first and/or second strands of: AD-40018.1 (SEQ ID NOs: 355 and 782), or a modified or unmodified variant thereof.

[2524] A RNAi agent comprising a first and a second strand, wherein the sequences of the first and/or second strands are the sequences of the first and/or second strands of: AD-40024.1 (SEQ ID NOs: 356 and 783), or a modified or unmodified variant thereof. A RNAi agent comprising a first and a second strand, wherein the sequences of the first and/or second strands are the sequences of the first and/or second strands of: AD-40030.1 (SEQ ID NOs: 357 and 784), or a modified or unmodified variant thereof.

[2525] A RNAi agent comprising a first and a second strand, wherein the sequences of the first and/or second strands are the sequences of the first and/or second strands of: AD-40036.1 (SEQ ID NOs: 358 and 785), or a modified or unmodified variant thereof.

[2526] A RNAi agent comprising a first and a second strand, wherein the sequences of the first and/or second strands are the sequences of the first and/or second strands of: AD-39995.1 (SEQ ID NOs: 359 and 786), or a modified or unmodified variant thereof.

[2527] A RNAi agent comprising a first and a second strand, wherein the sequences of the first and/or second strands are the sequences of the first and/or second strands of: AD-40001.1 (SEQ ID NOs: 360 and 787), or a modified or unmodified variant thereof.

[2528] A RNAi agent comprising a first and a second strand, wherein the sequences of the first and/or second strands are the sequences of the first and/or second strands of: AD-40007.1 (SEQ ID NOs: 361 and 788), or a modified or unmodified variant thereof.

[2529] A RNAi agent comprising a first and a second strand, wherein the sequences of the first and/or second strands are the sequences of the first and/or second strands of: AD-40013.1 (SEQ ID NOs: 362 and 789), or a modified or unmodified variant thereof.

[2530] A RNAi agent comprising a first and a second strand, wherein the sequences of the first and/or second strands are the sequences of the first and/or second strands of: AD-40019.1 (SEQ ID NOs: 363 and 790), or a modified or unmodified variant thereof.

[2531] A RNAi agent comprising a first and a second strand, wherein the sequences of the first and/or second strands are the sequences of the first and/or second strands of: AD-40025.1 (SEQ ID NOs: 364 and 791), or a modified or unmodified variant thereof.

[2532] A RNAi agent comprising a first and a second strand, wherein the sequences of the first and/or second strands are the sequences of the first and/or second strands of: AD-40031.1 (SEQ ID NOs: 365 and 792), or a modified or unmodified variant thereof.

[2533] A RNAi agent comprising a first and a second strand, wherein the sequences of the first and/or second strands are the sequences of the first and/or second strands of: AD-40037.1 (SEQ ID NOs: 366 and 793), or a modified or unmodified variant thereof.

[2534] A RNAi agent comprising a first and a second strand, wherein the sequences of the first and/or second strands are the sequences of the first and/or second strands of: AD-39996.1 (SEQ ID NOs: 367 and 794), or a modified or unmodified variant thereof.

[2535] A RNAi agent comprising a first and a second strand, wherein the sequences of the first and/or second strands are the sequences of the first and/or second strands of: AD-40002.1 (SEQ ID NOs: 368 and 795), or a modified or unmodified variant thereof.

[2536] A RNAi agent comprising a first and a second strand, wherein the sequences of the first and/or second strands are the sequences of the first and/or second strands of: AD-40008.1 (SEQ ID NOs: 369 and 796), or a modified or unmodified variant thereof.

[2537] A RNAi agent comprising a first and a second strand, wherein the sequences of the first and/or second strands are the sequences of the first and/or second strands of: AD-40014.1 (SEQ ID NOs: 370 and 797), or a modified or unmodified variant thereof.

[2538] A RNAi agent comprising a first and a second strand, wherein the sequences of the first and/or second strands are the sequences of the first and/or second strands of: AD-40020.1 (SEQ ID NOs: 371 and 798), or a modified or unmodified variant thereof.

[2539] A RNAi agent comprising a first and a second strand, wherein the sequences of the first and/or second strands are the sequences of the first and/or second strands of: AD-40026.1 (SEQ ID NOs: 372 and 799), or a modified or unmodified variant thereof.

[2540] A RNAi agent comprising a first and a second strand, wherein the sequences of the first and/or second strands are the sequences of the first and/or second strands of: AD-40032.1 (SEQ ID NOs: 373 and 800), or a modified or unmodified variant thereof.

[2541] A RNAi agent comprising a first and a second strand, wherein the sequences of the first and/or second strands are the sequences of the first and/or second strands of: AD-40038.1 (SEQ ID NOs: 374 and 801), or a modified or unmodified variant thereof.

[2542] A RNAi agent comprising a first and a second strand, wherein the sequences of the first and/or second strands are the sequences of the first and/or second strands of: AD-39997.1 (SEQ ID NOs: 375 and 802), or a modified or unmodified variant thereof.

[2543] A RNAi agent comprising a first and a second strand, wherein the sequences of the first and/or second strands are the sequences of the first and/or second strands of: AD-40009.1 (SEQ ID NOs: 376 and 803), or a modified or unmodified variant thereof.

[2544] A RNAi agent comprising a first and a second strand, wherein the sequences of the first and/or second strands are the sequences of the first and/or second strands of: AD-40015.1 (SEQ ID NOs: 377 and 804), or a modified or unmodified variant thereof.

[2545] A RNAi agent comprising a first and a second strand, wherein the sequences of the first and/or second strands are the sequences of the first and/or second strands of: AD-40021.1 (SEQ ID NOs: 378 and 805), or a modified or unmodified variant thereof.

[2546] A RNAi agent comprising a first and a second strand, wherein the sequences of the first and/or second strands are the sequences of the first and/or second strands of: AD-40027.1 (SEQ ID NOs: 379 and 806), or a modified or unmodified variant thereof.

[2547] A RNAi agent comprising a first and a second strand, wherein the sequences of the first and/or second strands are the sequences of the first and/or second strands of: AD-40033.1 (SEQ ID NOs: 380 and 807), or a modified or unmodified variant thereof.

[2548] A RNAi agent comprising a first and a second strand, wherein the sequences of the first and/or second strands are the sequences of the first and/or second strands of: AD-40039.1 (SEQ ID NOs: 381 and 808), or a modified or unmodified variant thereof.

[2549] A RNAi agent comprising a first and a second strand, wherein the sequences of the first and/or second strands are the sequences of the first and/or second strands of: AD-40045.1 (SEQ ID NOs: 382 and 809), or a modified or unmodified variant thereof.

[2550] A RNAi agent comprising a first and a second strand, wherein the sequences of the first and/or second strands are the sequences of the first and/or second strands of: AD-40051.1 (SEQ ID NOs: 383 and 810), or a modified or unmodified variant thereof.

[2551] A RNAi agent comprising a first and a second strand, wherein the sequences of the first and/or second strands are the sequences of the first and/or second strands of: AD-40057.1 (SEQ ID NOs: 384 and 811), or a modified or unmodified variant thereof.

[2552] A RNAi agent comprising a first and a second strand, wherein the sequences of the first and/or second strands are the sequences of the first and/or second strands of: AD-40063.1 (SEQ ID NOs: 385 and 812), or a modified or unmodified variant thereof.

[2553] A RNAi agent comprising a first and a second strand, wherein the sequences of the first and/or second strands are the sequences of the first and/or second strands of: AD-40069.1 (SEQ ID NOs: 386 and 813), or a modified or unmodified variant thereof.

[2554] A RNAi agent comprising a first and a second strand, wherein the sequences of the first and/or second strands are the sequences of the first and/or second strands of: AD-40075.1 (SEQ ID NOs: 387 and 814), or a modified or unmodified variant thereof.

[2555] A RNAi agent comprising a first and a second strand, wherein the sequences of the first and/or second strands are the sequences of the first and/or second strands of: AD-40081.1 (SEQ ID NOs: 388 and 815), or a modified or unmodified variant thereof.

[2556] A RNAi agent comprising a first and a second strand, wherein the sequences of the first and/or second strands are the sequences of the first and/or second strands of: AD-40040.1 (SEQ ID NOs: 389 and 816), or a modified or unmodified variant thereof.

[2557] A RNAi agent comprising a first and a second strand, wherein the sequences of the first and/or second strands are the sequences of the first and/or second strands of: AD-40046.1 (SEQ ID NOs: 390 and 817), or a modified or unmodified variant thereof.

[2558] A RNAi agent comprising a first and a second strand, wherein the sequences of the first and/or second strands are the sequences of the first and/or second strands of: AD-40052.1 (SEQ ID NOs: 391 and 818), or a modified or unmodified variant thereof.

[2559] A RNAi agent comprising a first and a second strand, wherein the sequences of the first and/or second strands are the sequences of the first and/or second strands of: AD-40058.1 (SEQ ID NOs: 392 and 819), or a modified or unmodified variant thereof.

[2560] A RNAi agent comprising a first and a second strand, wherein the sequences of the first and/or second strands are the sequences of the first and/or second strands of: AD-40064.1 (SEQ ID NOs: 393 and 820), or a modified or unmodified variant thereof.

[2561] A RNAi agent comprising a first and a second strand, wherein the sequences of the first and/or second strands are the sequences of the first and/or second strands of: AD-40070.1 (SEQ ID NOs: 394 and 821), or a modified or unmodified variant thereof.

[2562] A RNAi agent comprising a first and a second strand, wherein the sequences of the first and/or second strands are the sequences of the first and/or second strands of: AD-40076.1 (SEQ ID NOs: 395 and 822), or a modified or unmodified variant thereof.

[2563] A RNAi agent comprising a first and a second strand, wherein the sequences of the first and/or second strands are the sequences of the first and/or second strands of: AD-40082.1 (SEQ ID NOs: 396 and 823), or a modified or unmodified variant thereof. A RNAi agent comprising a first and a second strand, wherein the sequences of the first and/or second strands are the sequences of the first and/or second strands of: AD-40041.1 (SEQ ID NOs: 397 and 824), or a modified or unmodified variant thereof.

[2564] A RNAi agent comprising a first and a second strand, wherein the sequences of the first and/or second strands are the sequences of the first and/or second strands of: AD-40047.1 (SEQ ID NOs: 398 and 825), or a modified or unmodified variant thereof.

[2565] A RNAi agent comprising a first and a second strand, wherein the sequences of the first and/or second strands are the sequences of the first and/or second strands of: AD-40053.1 (SEQ ID NOs: 399 and 826), or a modified or unmodified variant thereof.

[2566] A RNAi agent comprising a first and a second strand, wherein the sequences of the first and/or second strands are the sequences of the first and/or second strands of: AD-40059.1 (SEQ ID NOs: 400 and 827), or a modified or unmodified variant thereof.

[2567] A RNAi agent comprising a first and a second strand, wherein the sequences of the first and/or second strands are the sequences of the first and/or second strands of: AD-40065.1 (SEQ ID NOs: 401 and 828), or a modified or unmodified variant thereof.

[2568] A RNAi agent comprising a first and a second strand, wherein the sequences of the first and/or second strands are the sequences of the first and/or second strands of: AD-40071.1 (SEQ ID NOs: 402 and 829), or a modified or unmodified variant thereof.

[2569] A RNAi agent comprising a first and a second strand, wherein the sequences of the first and/or second strands are the sequences of the first and/or second strands of: AD-40077.1 (SEQ ID NOs: 403 and 830), or a modified or unmodified variant thereof.

[2570] A RNAi agent comprising a first and a second strand, wherein the sequences of the first and/or second strands are the sequences of the first and/or second strands of: AD-40083.1 (SEQ ID NOs: 404 and 831), or a modified or unmodified variant thereof.

[2571] A RNAi agent comprising a first and a second strand, wherein the sequences of the first and/or second strands are the sequences of the first and/or second strands of: AD-40042.1 (SEQ ID NOs: 405 and 832), or a modified or unmodified variant thereof.

[2572] A RNAi agent comprising a first and a second strand, wherein the sequences of the first and/or second strands are the sequences of the first and/or second strands of: AD-40048.1 (SEQ ID NOs: 406 and 833), or a modified or unmodified variant thereof.

[2573] A RNAi agent comprising a first and a second strand, wherein the sequences of the first and/or second strands are the sequences of the first and/or second strands of: AD-40054.1 (SEQ ID NOs: 407 and 834), or a modified or unmodified variant thereof.

[2574] A RNAi agent comprising a first and a second strand, wherein the sequences of the first and/or second strands are the sequences of the first and/or second strands of: AD-40060.1 (SEQ ID NOs: 408 and 835), or a modified or unmodified variant thereof.

[2575] A RNAi agent comprising a first and a second strand, wherein the sequences of the first and/or second strands are the sequences of the first and/or second strands of: AD-40066.1 (SEQ ID NOs: 409 and 836), or a modified or unmodified variant thereof.

[2576] A RNAi agent comprising a first and a second strand, wherein the sequences of the first and/or second strands are the sequences of the first and/or second strands of: AD-40072.1 (SEQ ID NOs: 410 and 837), or a modified or unmodified variant thereof.

[2577] A RNAi agent comprising a first and a second strand, wherein the sequences of the first and/or second strands are the sequences of the first and/or second strands of: AD-40078.1 (SEQ ID NOs: 411 and 838), or a modified or unmodified variant thereof.

[2578] A RNAi agent comprising a first and a second strand, wherein the sequences of the first and/or second strands are the sequences of the first and/or second strands of: AD-40084.1 (SEQ ID NOs: 412 and 839), or a modified or unmodified variant thereof.

[2579] A RNAi agent comprising a first and a second strand, wherein the sequences of the first and/or second strands are the sequences of the first and/or second strands of: AD-40043.1 (SEQ ID NOs: 413 and 840), or a modified or unmodified variant thereof.

[2580] A RNAi agent comprising a first and a second strand, wherein the sequences of the first and/or second strands are the sequences of the first and/or second strands of: AD-40049.1 (SEQ ID NOs: 414 and 841), or a modified or unmodified variant thereof.

[2581] A RNAi agent comprising a first and a second strand, wherein the sequences of the first and/or second strands are the sequences of the first and/or second strands of: AD-40055.1 (SEQ ID NOs: 415 and 842), or a modified or unmodified variant thereof.

[2582] A RNAi agent comprising a first and a second strand, wherein the sequences of the first and/or second strands are the sequences of the first and/or second strands of: AD-40061.1 (SEQ ID NOs: 416 and 843), or a modified or unmodified variant thereof.

[2583] A RNAi agent comprising a first and a second strand, wherein the sequences of the first and/or second strands are the sequences of the first and/or second strands of: AD-40067.1 (SEQ ID NOs: 417 and 844), or a modified or unmodified variant thereof.

[2584] A RNAi agent comprising a first and a second strand, wherein the sequences of the first and/or second strands are the sequences of the first and/or second strands of: AD-40073.1 (SEQ ID NOs: 418 and 845), or a modified or unmodified variant thereof.

[2585] A RNAi agent comprising a first and a second strand, wherein the sequences of the first and/or second strands are the sequences of the first and/or second strands of: AD-40079.1 (SEQ ID NOs: 419 and 846), or a modified or unmodified variant thereof.

[2586] A RNAi agent comprising a first and a second strand, wherein the sequences of the first and/or second strands are the sequences of the first and/or second strands of: AD-40085.1 (SEQ ID NOs: 420 and 847), or a modified or unmodified variant thereof.

[2587] A RNAi agent comprising a first and a second strand, wherein the sequences of the first and/or second strands are the sequences of the first and/or second strands of: AD-40044.1 (SEQ ID NOs: 421 and 848), or a modified or unmodified variant thereof.

[2588] A RNAi agent comprising a first and a second strand, wherein the sequences of the first and/or second strands are the sequences of the first and/or second strands of: AD-40050.1 (SEQ ID NOs: 422 and 849), or a modified or unmodified variant thereof.

[2589] A RNAi agent comprising a first and a second strand, wherein the sequences of the first and/or second strands are the sequences of the first and/or second strands of: AD-40056.1 (SEQ ID NOs: 423 and 850), or a modified or unmodified variant thereof.

[2590] A RNAi agent comprising a first and a second strand, wherein the sequences of the first and/or second strands are the sequences of the first and/or second strands of: AD-40062.1 (SEQ ID NOs: 424 and 851), or a modified or unmodified variant thereof.

[2591] A RNAi agent comprising a first and a second strand, wherein the sequences of the first and/or second strands are the sequences of the first and/or second strands of: AD-40068.1 (SEQ ID NOs: 425 and 852), or a modified or unmodified variant thereof.

[2592] A RNAi agent comprising a first and a second strand, wherein the sequences of the first and/or second strands are the sequences of the first and/or second strands of: AD-40074.1 (SEQ ID NOs: 426 and 853), or a modified or unmodified variant thereof.

[2593] A RNAi agent comprising a first and a second strand, wherein the sequences of the first and/or second strands are the sequences of the first and/or second strands of: AD-40080.1 (SEQ ID NOs: 427 and 854), or a modified or unmodified variant thereof.

[2594] A RNAi agent comprising a first and a second strand, wherein the sequences of the first and/or second strands are the sequences of the first and/or second strands of: AD-39720.1 (SEQ ID NOs: 1716 and 1754), or a modified or unmodified variant thereof.

[2595] A RNAi agent comprising a first and a second strand, wherein the sequences of the first and/or second strands are the sequences of the first and/or second strands of: AD-39706.1 (SEQ ID NOs: 1717 and 1755), or a modified or unmodified variant thereof.

[2596] A RNAi agent comprising a first and a second strand, wherein the sequences of the first and/or second strands are the sequences of the first and/or second strands of: AD-39712.1 (SEQ ID NOs: 1718 and 1756), or a modified or unmodified variant thereof.

[2597] A RNAi agent comprising a first and a second strand, wherein the sequences of the first and/or second strands are the sequences of the first and/or second strands of: AD-39760.1 (SEQ ID NOs: 1719 and 1757), or a modified or unmodified variant thereof.

[2598] A RNAi agent comprising a first and a second strand, wherein the sequences of the first and/or second strands are the sequences of the first and/or second strands of: AD-39732.1 (SEQ ID NOs: 1720 and 1758), or a modified or unmodified variant thereof.

[2599] A RNAi agent comprising a first and a second strand, wherein the sequences of the first and/or second strands are the sequences of the first and/or second strands of: AD-35541.4 (SEQ ID NOs: 1721 and 1759), or a modified or unmodified variant thereof.

[2600] A RNAi agent comprising a first and a second strand, wherein the sequences of the first and/or second strands are the sequences of the first and/or second strands of: AD-39735.1 or hs_KRAS_321_A22S26 (SEQ ID NOs: 1722 and 1760), or a modified or unmodified variant thereof.

[2601] A RNAi agent comprising a first and a second strand, wherein the sequences of the first and/or second strands are the sequences of the first and/or second strands of: AD-39741.1, or modified or unmodified variants thereof.

[2602] A RNAi agent comprising a first and a second strand, wherein the sequences of the first and/or second strands are the sequences of the first and/or second strands of: hs_KRAS_322_A22S26 (SEQ ID NOs: 1723 and 1761), or a modified or unmodified variant thereof. A RNAi agent comprising a first and a second strand, wherein the sequences of the first and/or second strands are the sequences of the first and/or second strands of: AD-39778.1 (SEQ ID NOs: 1724 and 1762), or a modified or unmodified variant thereof.

[2603] A RNAi agent comprising a first and a second strand, wherein the sequences of the first and/or second strands are the sequences of the first and/or second strands of: AD-39790.1 (SEQ ID NOs: 1725 and 1763), or a modified or unmodified variant thereof.

[2604] A RNAi agent comprising a first and a second strand, wherein the sequences of the first and/or second strands are the sequences of the first and/or second strands of: AD-39822.1 (SEQ ID NOs: 1726 and 1764), or a modified or unmodified variant thereof.

[2605] A RNAi agent comprising a first and a second strand, wherein the sequences of the first and/or second strands are the sequences of the first and/or second strands of: AD-35609.4 (SEQ ID NOs: 1727 and 1765), or a modified or unmodified variant thereof.

[2606] A RNAi agent comprising a first and a second strand, wherein the sequences of the first and/or second strands are the sequences of the first and/or second strands of: AD-35581.4 (SEQ ID NOs: 1728 and 1766), or a modified or unmodified variant thereof.

[2607] A RNAi agent comprising a first and a second strand, wherein the sequences of the first and/or second strands are the sequences of the first and/or second strands of: AD-39845.1 (SEQ ID NOs: 1729 and 1767), or a modified or unmodified variant thereof.

[2608] A RNAi agent comprising a first and a second strand, wherein the sequences of the first and/or second strands are the sequences of the first and/or second strands of: AD-39858.1 (SEQ ID NOs: 1730 and 1768), or a modified or unmodified variant thereof.

[2609] A RNAi agent comprising a first and a second strand, wherein the sequences of the first and/or second strands are the sequences of the first and/or second strands of: AD-39870.1 (SEQ ID NOs: 1731 and 1769), or a modified or unmodified variant thereof.

[2610] A RNAi agent comprising a first and a second strand, wherein the sequences of the first and/or second strands are the sequences of the first and/or second strands of: AD-35576.4 (SEQ ID NOs: 1732 and 1770), or a modified or unmodified variant thereof.

[2611] A RNAi agent comprising a first and a second strand, wherein the sequences of the first and/or second strands are the sequences of the first and/or second strands of: AD-35588.4 (SEQ ID NOs: 1733 and 1771), or a modified or unmodified variant thereof.

[2612] A RNAi agent comprising a first and a second strand, wherein the sequences of the first and/or second strands are the sequences of the first and/or second strands of: AD-35600.1 (SEQ ID NOs: 1734 and 1772), or a modified or unmodified variant thereof.

[2613] A RNAi agent comprising a first and a second strand, wherein the sequences of the first and/or second strands are the sequences of the first and/or second strands of: AD-35606.1 (SEQ ID NOs: 1735 and 1773), or a modified or unmodified variant thereof.

[2614] A RNAi agent comprising a first and a second strand, wherein the sequences of the first and/or second strands are the sequences of the first and/or second strands of: AD-38151.1 (SEQ ID NOs: 1736 and 1774), or a modified or unmodified variant thereof. A RNAi agent comprising a first and a second strand, wherein the sequences of the first and/or second strands are the sequences of the first and/or second strands of: AD-38163.1 (SEQ ID NOs: 1737 and 1775), or a modified or unmodified variant thereof.

[2615] A RNAi agent comprising a first and a second strand, wherein the sequences of the first and/or second strands are the sequences of the first and/or second strands of: AD-39999.1 (SEQ ID NOs: 1738 and 1776), or a modified or unmodified variant thereof.

[2616] A RNAi agent comprising a first and a second strand, wherein the sequences of the first and/or second strands are the sequences of the first and/or second strands of: AD-38159.1 or hs_KRAS_528_A22S26 (SEQ ID NOs: 1739 and 1777), or a modified or unmodified variant thereof.

[2617] A RNAi agent comprising a first and a second strand, wherein the sequences of the first and/or second strands are the sequences of the first and/or second strands of: AD-38130.1 or hs_KRAS_531_A22S26 (SEQ ID NOs: 1740 and 1778), or a modified or unmodified variant thereof.

[2618] A RNAi agent comprising a first and a second strand, wherein the sequences of the first and/or second strands are the sequences of the first and/or second strands of: AD-38136.1 (SEQ ID NOs: 1741 and 1779), or a modified or unmodified variant thereof.

[2619] A RNAi agent comprising a first and a second strand, wherein the sequences of the first and/or second strands are the sequences of the first and/or second strands of: AD-40036.1 (SEQ ID NOs: 1742 and 1780), or a modified or unmodified variant thereof.

[2620] A RNAi agent comprising a first and a second strand, wherein the sequences of the first and/or second strands are the sequences of the first and/or second strands of: AD-40008.1 (SEQ ID NOs: 1743 and 1781), or a modified or unmodified variant thereof.

[2621] A RNAi agent comprising a first and a second strand, wherein the sequences of the first and/or second strands are the sequences of the first and/or second strands of: AD-40021.1 (SEQ ID NOs: 1744 and 1782), or a modified or unmodified variant thereof.

[2622] A RNAi agent comprising a first and a second strand, wherein the sequences of the first and/or second strands are the sequences of the first and/or second strands of: AD-40077.1 (SEQ ID NOs: 1745 and 1783), or a modified or unmodified variant thereof.

[2623] A RNAi agent comprising a first and a second strand, wherein the sequences of the first and/or second strands are the sequences of the first and/or second strands of: AD-40072.1 (SEQ ID NOs: 1746 and 1784), or a modified or unmodified variant thereof.

[2624] A RNAi agent comprising a first and a second strand, wherein the sequences of the first and/or second strands are the sequences of the first and/or second strands of: AD-40061.1 (SEQ ID NOs: 1747 and 1785), or a modified or unmodified variant thereof.

[2625] A RNAi agent comprising a first and a second strand, wherein the sequences of the first and/or second strands are the sequences of the first and/or second strands of: AD-40068.1 (SEQ ID NOs: 1748 and 1786), or a modified or unmodified variant thereof.

[2626] A RNAi agent comprising a first and a second strand, wherein the sequences of the first and/or second strands are the sequences of the first and/or second strands of: AD-38131.1 (SEQ ID NOs: 1749 and 1787), or a modified or unmodified variant thereof. A RNAi agent comprising a first and a second strand, wherein the sequences of the first and/or second strands are the sequences of the first and/or second strands of: AD-38167.1 (SEQ ID NOs: 1750 and 1788), or a modified or unmodified variant thereof.

[2627] A RNAi agent comprising a first and a second strand, wherein the sequences of the first and/or second strands are the sequences of the first and/or second strands of: hs_KRAS 1273_A22S26 (SEQ ID NOs: 1751 and 1789), or a modified or unmodified variant thereof.

[2628] A RNAi agent comprising a first and a second strand, wherein the sequences of the first and/or second strands are the sequences of the first and/or second strands of: hs_KRAS 2892_A37S26 (SEQ ID NOs: 1752 and 1790), or a modified or unmodified variant thereof.

[2629] A RNAi agent comprising a first and a second strand, wherein the sequences of the first and/or second strands are the sequences of the first and/or second strands of: hs_KRAS 4731_A22S26 (SEQ ID NOs: 1753 and 1791), or a modified or unmodified variant thereof.

Specific Embodiments Wherein the Sequences of the First and/or Second Strands are the Sequences of the First and/or Second Strand of a RNAi Agent Disclosed Herein, Further Comprising Up to about 20 Additional Nucleotides

[2630] In one embodiment, the present disclosure pertains to a composition comprising any one or more of: a RNAi agent comprising a first and a second strand, wherein the sequence of the first and/or second strand is the sequence of a first and/or second strand of any RNAi agent from any of Tables 1 to 6, or modified and unmodified variants thereof, wherein the first and/or second strand further comprise up to about 20 additional nucleotides, wherein the first and/or second strand further comprise up to about 20 additional nucleotides.

[2631] Thus, in various embodiments, the present disclosure pertains to a composition comprising any one or more of the following: A RNAi agent comprising a first and a second strand, wherein the sequence of the first and/or second strand is the sequence of a first and/or second strand of: AD-35523.3 (SEQ ID NOs: 1 and 428), or modified or unmodified variants thereof, wherein the first and/or second strand further comprise up to about 20 additional nucleotides.

[2632] A RNAi agent comprising a first and a second strand, wherein the sequence of the first and/or second strand is the sequence of a first and/or second strand of: AD-35529.1 (SEQ ID NOs: 2 and 429), or modified or unmodified variants thereof, wherein the first and/or second strand further comprise up to about 20 additional nucleotides.

[2633] A RNAi agent comprising a first and a second strand, wherein the sequence of the first and/or second strand is the sequence of a first and/or second strand of: AD-35535.4 (SEQ ID NOs: 3 and 430), or modified or unmodified variants thereof, wherein the first and/or second strand further comprise up to about 20 additional nucleotides.

[2634] A RNAi agent comprising a first and a second strand, wherein the sequence of the first and/or second strand is the sequence of a first and/or second strand of: AD-35541.4 (SEQ ID NOs: 4 and 431), or modified or unmodified variants thereof, wherein the first and/or second strand further comprise up to about 20 additional nucleotides. A RNAi agent comprising a first and a second strand, wherein the sequence of the first and/or second strand is the sequence of a first and/or second strand of: AD-35547.4 (SEQ ID NOs: 5 and 432), or modified or unmodified variants thereof, wherein the first and/or second strand further comprise up to about 20 additional nucleotides.

[2635] A RNAi agent comprising a first and a second strand, wherein the sequence of the first and/or second strand is the sequence of a first and/or second strand of: AD-35553.4 (SEQ ID NOs: 6 and 433), or modified or unmodified variants thereof, wherein the first and/or second strand further comprise up to about 20 additional nucleotides.

[2636] A RNAi agent comprising a first and a second strand, wherein the sequence of the first and/or second strand is the sequence of a first and/or second strand of: AD-35559.4 (SEQ ID NOs: 7 and 434), or modified or unmodified variants thereof, wherein the first and/or second strand further comprise up to about 20 additional nucleotides.

[2637] A RNAi agent comprising a first and a second strand, wherein the sequence of the first and/or second strand is the sequence of a first and/or second strand of: AD-35565.4 (SEQ ID NOs: 8 and 435), or modified or unmodified variants thereof, wherein the first and/or second strand further comprise up to about 20 additional nucleotides.

[2638] A RNAi agent comprising a first and a second strand, wherein the sequence of the first and/or second strand is the sequence of a first and/or second strand of: AD-35524.4 (SEQ ID NOs: 9 and 436), or modified or unmodified variants thereof, wherein the first and/or second strand further comprise up to about 20 additional nucleotides.

[2639] A RNAi agent comprising a first and a second strand, wherein the sequence of the first and/or second strand is the sequence of a first and/or second strand of: AD-35530.4 (SEQ ID NOs: 10 and 437), or modified or unmodified variants thereof, wherein the first and/or second strand further comprise up to about 20 additional nucleotides.

[2640] A RNAi agent comprising a first and a second strand, wherein the sequence of the first and/or second strand is the sequence of a first and/or second strand of: AD-35536.4 (SEQ ID NOs: 11 and 438), or modified or unmodified variants thereof, wherein the first and/or second strand further comprise up to about 20 additional nucleotides.

[2641] A RNAi agent comprising a first and a second strand, wherein the sequence of the first and/or second strand is the sequence of a first and/or second strand of: AD-35542.4 (SEQ ID NOs: 12 and 439), or modified or unmodified variants thereof, wherein the first and/or second strand further comprise up to about 20 additional nucleotides.

[2642] A RNAi agent comprising a first and a second strand, wherein the sequence of the first and/or second strand is the sequence of a first and/or second strand of: AD-35548.4 (SEQ ID NOs: 13 and 440), or modified or unmodified variants thereof, wherein the first and/or second strand further comprise up to about 20 additional nucleotides.

[2643] A RNAi agent comprising a first and a second strand, wherein the sequence of the first and/or second strand is the sequence of a first and/or second strand of: AD-35554.4 (SEQ ID NOs: 14 and 441), or modified or unmodified variants thereof, wherein the first and/or second strand further comprise A RNAi agent comprising a first and a second strand, wherein the sequence of the first and/or second strand is the sequence of a first and/or second strand of: AD-35560.2 (SEQ ID NOs: 15 and 442), or modified or unmodified variants thereof, wherein the first and/or second strand further comprise up to about 20 additional nucleotides.

[2644] A RNAi agent comprising a first and a second strand, wherein the sequence of the first and/or second strand is the sequence of a first and/or second strand of: AD-35566.4 (SEQ ID NOs: 16 and 443), or modified or unmodified variants thereof, wherein the first and/or second strand further comprise up to about 20 additional nucleotides.

[2645] A RNAi agent comprising a first and a second strand, wherein the sequence of the first and/or second strand is the sequence of a first and/or second strand of: AD-35525.2 (SEQ ID NOs: 17 and 444), or modified or unmodified variants thereof, wherein the first and/or second strand further comprise up to about 20 additional nucleotides.

[2646] A RNAi agent comprising a first and a second strand, wherein the sequence of the first and/or second strand is the sequence of a first and/or second strand of: AD-35531.4 (SEQ ID NOs: 18 and 445), or modified or unmodified variants thereof, wherein the first and/or second strand further comprise up to about 20 additional nucleotides.

[2647] A RNAi agent comprising a first and a second strand, wherein the sequence of the first and/or second strand is the sequence of a first and/or second strand of: AD-35537.4 (SEQ ID NOs: 19 and 446), or modified or unmodified variants thereof, wherein the first and/or second strand further comprise up to about 20 additional nucleotides.

[2648] A RNAi agent comprising a first and a second strand, wherein the sequence of the first and/or second strand is the sequence of a first and/or second strand of: AD-35543.2 (SEQ ID NOs: 20 and 447), or modified or unmodified variants thereof, wherein the first and/or second strand further comprise up to about 20 additional nucleotides.

[2649] A RNAi agent comprising a first and a second strand, wherein the sequence of the first and/or second strand is the sequence of a first and/or second strand of: AD-35549.4 (SEQ ID NOs: 21 and 448), or modified or unmodified variants thereof, wherein the first and/or second strand further comprise up to about 20 additional nucleotides.

[2650] A RNAi agent comprising a first and a second strand, wherein the sequence of the first and/or second strand is the sequence of a first and/or second strand of: AD-35555.4 (SEQ ID NOs: 22 and 449), or modified or unmodified variants thereof, wherein the first and/or second strand further comprise up to about 20 additional nucleotides.

[2651] A RNAi agent comprising a first and a second strand, wherein the sequence of the first and/or second strand is the sequence of a first and/or second strand of: AD-35561.4 (SEQ ID NOs: 23 and 450), or modified or unmodified variants thereof, wherein the first and/or second strand further comprise up to about 20 additional nucleotides.

[2652] A RNAi agent comprising a first and a second strand, wherein the sequence of the first and/or second strand is the sequence of a first and/or second strand of: AD-35567.4 (SEQ ID NOs: 24 and 451), or modified or unmodified variants thereof, wherein the first and/or second strand further comprise A RNAi agent comprising a first and a second strand, wherein the sequence of the first and/or second strand is the sequence of a first and/or second strand of: AD-35526.4 (SEQ ID NOs: 25 and 452), or modified or unmodified variants thereof, wherein the first and/or second strand further comprise up to about 20 additional nucleotides.

[2653] A RNAi agent comprising a first and a second strand, wherein the sequence of the first and/or second strand is the sequence of a first and/or second strand of: AD-35532.4 (SEQ ID NOs: 26 and 453), or modified or unmodified variants thereof, wherein the first and/or second strand further comprise up to about 20 additional nucleotides.

[2654] A RNAi agent comprising a first and a second strand, wherein the sequence of the first and/or second strand is the sequence of a first and/or second strand of: AD-35538.4 (SEQ ID NOs: 27 and 454), or modified or unmodified variants thereof, wherein the first and/or second strand further comprise up to about 20 additional nucleotides.

[2655] A RNAi agent comprising a first and a second strand, wherein the sequence of the first and/or second strand is the sequence of a first and/or second strand of: AD-35544.4 (SEQ ID NOs: 28 and 455), or modified or unmodified variants thereof, wherein the first and/or second strand further comprise up to about 20 additional nucleotides.

[2656] A RNAi agent comprising a first and a second strand, wherein the sequence of the first and/or second strand is the sequence of a first and/or second strand of: AD-35550.4 (SEQ ID NOs: 29 and 456), or modified or unmodified variants thereof, wherein the first and/or second strand further comprise up to about 20 additional nucleotides.

[2657] A RNAi agent comprising a first and a second strand, wherein the sequence of the first and/or second strand is the sequence of a first and/or second strand of: AD-35556.4 (SEQ ID NOs: 30 and 457), or modified or unmodified variants thereof, wherein the first and/or second strand further comprise up to about 20 additional nucleotides.

[2658] A RNAi agent comprising a first and a second strand, wherein the sequence of the first and/or second strand is the sequence of a first and/or second strand of: AD-35562.4 (SEQ ID NOs: 31 and 458), or modified or unmodified variants thereof, wherein the first and/or second strand further comprise up to about 20 additional nucleotides.

[2659] A RNAi agent comprising a first and a second strand, wherein the sequence of the first and/or second strand is the sequence of a first and/or second strand of: AD-35568.4 (SEQ ID NOs: 32 and 459), or modified or unmodified variants thereof, wherein the first and/or second strand further comprise up to about 20 additional nucleotides.

[2660] A RNAi agent comprising a first and a second strand, wherein the sequence of the first and/or second strand is the sequence of a first and/or second strand of: AD-35527.4 (SEQ ID NOs: 33 and 460), or modified or unmodified variants thereof, wherein the first and/or second strand further comprise up to about 20 additional nucleotides.

[2661] A RNAi agent comprising a first and a second strand, wherein the sequence of the first and/or second strand is the sequence of a first and/or second strand of: AD-35533.4 (SEQ ID NOs: 34 and 461), or modified or unmodified variants thereof, wherein the first and/or second strand further comprise A RNAi agent comprising a first and a second strand, wherein the sequence of the first and/or second strand is the sequence of a first and/or second strand of: AD-35539.4 (SEQ ID NOs: 35 and 462), or modified or unmodified variants thereof, wherein the first and/or second strand further comprise up to about 20 additional nucleotides.

[2662] A RNAi agent comprising a first and a second strand, wherein the sequence of the first and/or second strand is the sequence of a first and/or second strand of: AD-35545.4 (SEQ ID NOs: 36 and 463), or modified or unmodified variants thereof, wherein the first and/or second strand further comprise up to about 20 additional nucleotides.

[2663] A RNAi agent comprising a first and a second strand, wherein the sequence of the first and/or second strand is the sequence of a first and/or second strand of: AD-35551.4 (SEQ ID NOs: 37 and 464), or modified or unmodified variants thereof, wherein the first and/or second strand further comprise up to about 20 additional nucleotides.

[2664] A RNAi agent comprising a first and a second strand, wherein the sequence of the first and/or second strand is the sequence of a first and/or second strand of: AD-35563.4 (SEQ ID NOs: 38 and 465), or modified or unmodified variants thereof, wherein the first and/or second strand further comprise up to about 20 additional nucleotides.

[2665] A RNAi agent comprising a first and a second strand, wherein the sequence of the first and/or second strand is the sequence of a first and/or second strand of: AD-35528.4 (SEQ ID NOs: 39 and 466), or modified or unmodified variants thereof, wherein the first and/or second strand further comprise up to about 20 additional nucleotides.

[2666] A RNAi agent comprising a first and a second strand, wherein the sequence of the first and/or second strand is the sequence of a first and/or second strand of: AD-35540.4 (SEQ ID NOs: 40 and 467), or modified or unmodified variants thereof, wherein the first and/or second strand further comprise up to about 20 additional nucleotides.

[2667] A RNAi agent comprising a first and a second strand, wherein the sequence of the first and/or second strand is the sequence of a first and/or second strand of: AD-35546.4 (SEQ ID NOs: 41 and 468), or modified or unmodified variants thereof, wherein the first and/or second strand further comprise up to about 20 additional nucleotides.

[2668] A RNAi agent comprising a first and a second strand, wherein the sequence of the first and/or second strand is the sequence of a first and/or second strand of: AD-35552.4 (SEQ ID NOs: 42 and 469), or modified or unmodified variants thereof, wherein the first and/or second strand further comprise up to about 20 additional nucleotides.

[2669] A RNAi agent comprising a first and a second strand, wherein the sequence of the first and/or second strand is the sequence of a first and/or second strand of: AD-35558.4 (SEQ ID NOs: 43 and 470), or modified or unmodified variants thereof, wherein the first and/or second strand further comprise up to about 20 additional nucleotides.

[2670] A RNAi agent comprising a first and a second strand, wherein the sequence of the first and/or second strand is the sequence of a first and/or second strand of: AD-35564.4 (SEQ ID NOs: 44 and 471), or modified or unmodified variants thereof, wherein the first and/or second strand further comprise A RNAi agent comprising a first and a second strand, wherein the sequence of the first and/or second strand is the sequence of a first and/or second strand of: AD-35570.4 (SEQ ID NOs: 45 and 472), or modified or unmodified variants thereof, wherein the first and/or second strand further comprise up to about 20 additional nucleotides.

[2671] A RNAi agent comprising a first and a second strand, wherein the sequence of the first and/or second strand is the sequence of a first and/or second strand of: AD-35571.4 (SEQ ID NOs: 46 and 473), or modified or unmodified variants thereof, wherein the first and/or second strand further comprise up to about 20 additional nucleotides.

[2672] A RNAi agent comprising a first and a second strand, wherein the sequence of the first and/or second strand is the sequence of a first and/or second strand of: AD-35577.4 (SEQ ID NOs: 47 and 474), or modified or unmodified variants thereof, wherein the first and/or second strand further comprise up to about 20 additional nucleotides.

[2673] A RNAi agent comprising a first and a second strand, wherein the sequence of the first and/or second strand is the sequence of a first and/or second strand of: AD-35583.4 (SEQ ID NOs: 48 and 475), or modified or unmodified variants thereof, wherein the first and/or second strand further comprise up to about 20 additional nucleotides.

[2674] A RNAi agent comprising a first and a second strand, wherein the sequence of the first and/or second strand is the sequence of a first and/or second strand of: AD-35589.4 (SEQ ID NOs: 49 and 476), or modified or unmodified variants thereof, wherein the first and/or second strand further comprise up to about 20 additional nucleotides.

[2675] A RNAi agent comprising a first and a second strand, wherein the sequence of the first and/or second strand is the sequence of a first and/or second strand of: AD-35595.4 (SEQ ID NOs: 50 and 477), or modified or unmodified variants thereof, wherein the first and/or second strand further comprise up to about 20 additional nucleotides.

[2676] A RNAi agent comprising a first and a second strand, wherein the sequence of the first and/or second strand is the sequence of a first and/or second strand of: AD-35601.4 (SEQ ID NOs: 51 and 478), or modified or unmodified variants thereof, wherein the first and/or second strand further comprise up to about 20 additional nucleotides.

[2677] A RNAi agent comprising a first and a second strand, wherein the sequence of the first and/or second strand is the sequence of a first and/or second strand of: AD-35607.4 (SEQ ID NOs: 52 and 479), or modified or unmodified variants thereof, wherein the first and/or second strand further comprise up to about 20 additional nucleotides.

[2678] A RNAi agent comprising a first and a second strand, wherein the sequence of the first and/or second strand is the sequence of a first and/or second strand of: AD-35613.4 (SEQ ID NOs: 53 and 480), or modified or unmodified variants thereof, wherein the first and/or second strand further comprise up to about 20 additional nucleotides.

[2679] A RNAi agent comprising a first and a second strand, wherein the sequence of the first and/or second strand is the sequence of a first and/or second strand of: AD-35572.4 (SEQ ID NOs: 54 and 481), or modified or unmodified variants thereof, wherein the first and/or second strand further comprise A RNAi agent comprising a first and a second strand, wherein the sequence of the first and/or second strand is the sequence of a first and/or second strand of: AD-35578.4 (SEQ ID NOs: 55 and 482), or modified or unmodified variants thereof, wherein the first and/or second strand further comprise up to about 20 additional nucleotides.

[2680] A RNAi agent comprising a first and a second strand, wherein the sequence of the first and/or second strand is the sequence of a first and/or second strand of: AD-35584.4 (SEQ ID NOs: 56 and 483), or modified or unmodified variants thereof, wherein the first and/or second strand further comprise up to about 20 additional nucleotides.

[2681] A RNAi agent comprising a first and a second strand, wherein the sequence of the first and/or second strand is the sequence of a first and/or second strand of: AD-35590.4 (SEQ ID NOs: 57 and 484), or modified or unmodified variants thereof, wherein the first and/or second strand further comprise up to about 20 additional nucleotides.

[2682] A RNAi agent comprising a first and a second strand, wherein the sequence of the first and/or second strand is the sequence of a first and/or second strand of: AD-35596.4 (SEQ ID NOs: 58 and 485), or modified or unmodified variants thereof, wherein the first and/or second strand further comprise up to about 20 additional nucleotides.

[2683] A RNAi agent comprising a first and a second strand, wherein the sequence of the first and/or second strand is the sequence of a first and/or second strand of: AD-35602.4 (SEQ ID NOs: 59 and 486), or modified or unmodified variants thereof, wherein the first and/or second strand further comprise up to about 20 additional nucleotides.

[2684] A RNAi agent comprising a first and a second strand, wherein the sequence of the first and/or second strand is the sequence of a first and/or second strand of: AD-35608.4 (SEQ ID NOs: 60 and 487), or modified or unmodified variants thereof, wherein the first and/or second strand further comprise up to about 20 additional nucleotides.

[2685] A RNAi agent comprising a first and a second strand, wherein the sequence of the first and/or second strand is the sequence of a first and/or second strand of: AD-35614.4 (SEQ ID NOs: 61 and 488), or modified or unmodified variants thereof, wherein the first and/or second strand further comprise up to about 20 additional nucleotides.

[2686] A RNAi agent comprising a first and a second strand, wherein the sequence of the first and/or second strand is the sequence of a first and/or second strand of: AD-35573.4 (SEQ ID NOs: 62 and 489), or modified or unmodified variants thereof, wherein the first and/or second strand further comprise up to about 20 additional nucleotides.

[2687] A RNAi agent comprising a first and a second strand, wherein the sequence of the first and/or second strand is the sequence of a first and/or second strand of: AD-35579.4 (SEQ ID NOs: 63 and 490), or modified or unmodified variants thereof, wherein the first and/or second strand further comprise up to about 20 additional nucleotides.

[2688] A RNAi agent comprising a first and a second strand, wherein the sequence of the first and/or second strand is the sequence of a first and/or second strand of: AD-35585.4 (SEQ ID NOs: 64 and 491), or modified or unmodified variants thereof, wherein the first and/or second strand further comprise A RNAi agent comprising a first and a second strand, wherein the sequence of the first and/or second strand is the sequence of a first and/or second strand of: AD-35591.4 (SEQ ID NOs: 65 and 492), or modified or unmodified variants thereof, wherein the first and/or second strand further comprise up to about 20 additional nucleotides.

[2689] A RNAi agent comprising a first and a second strand, wherein the sequence of the first and/or second strand is the sequence of a first and/or second strand of: AD-35597.4 (SEQ ID NOs: 66 and 493), or modified or unmodified variants thereof, wherein the first and/or second strand further comprise up to about 20 additional nucleotides.

[2690] A RNAi agent comprising a first and a second strand, wherein the sequence of the first and/or second strand is the sequence of a first and/or second strand of: AD-35603.4 (SEQ ID NOs: 67 and 494), or modified or unmodified variants thereof, wherein the first and/or second strand further comprise up to about 20 additional nucleotides.

[2691] A RNAi agent comprising a first and a second strand, wherein the sequence of the first and/or second strand is the sequence of a first and/or second strand of: AD-35609.4 (SEQ ID NOs: 68 and 495), or modified or unmodified variants thereof, wherein the first and/or second strand further comprise up to about 20 additional nucleotides.

[2692] A RNAi agent comprising a first and a second strand, wherein the sequence of the first and/or second strand is the sequence of a first and/or second strand of: AD-35615.4 (SEQ ID NOs: 69 and 496), or modified or unmodified variants thereof, wherein the first and/or second strand further comprise up to about 20 additional nucleotides.

[2693] A RNAi agent comprising a first and a second strand, wherein the sequence of the first and/or second strand is the sequence of a first and/or second strand of: AD-35574.4 (SEQ ID NOs: 70 and 497), or modified or unmodified variants thereof, wherein the first and/or second strand further comprise up to about 20 additional nucleotides.

[2694] A RNAi agent comprising a first and a second strand, wherein the sequence of the first and/or second strand is the sequence of a first and/or second strand of: AD-35580.1 (SEQ ID NOs: 71 and 498), or modified or unmodified variants thereof, wherein the first and/or second strand further comprise up to about 20 additional nucleotides.

[2695] A RNAi agent comprising a first and a second strand, wherein the sequence of the first and/or second strand is the sequence of a first and/or second strand of: AD-35586.4 (SEQ ID NOs: 72 and 499), or modified or unmodified variants thereof, wherein the first and/or second strand further comprise up to about 20 additional nucleotides.

[2696] A RNAi agent comprising a first and a second strand, wherein the sequence of the first and/or second strand is the sequence of a first and/or second strand of: AD-35592.4 (SEQ ID NOs: 73 and 500), or modified or unmodified variants thereof, wherein the first and/or second strand further comprise up to about 20 additional nucleotides.

[2697] A RNAi agent comprising a first and a second strand, wherein the sequence of the first and/or second strand is the sequence of a first and/or second strand of: AD-35598.4 (SEQ ID NOs: 74 and 501), or modified or unmodified variants thereof, wherein the first and/or second strand further comprise A RNAi agent comprising a first and a second strand, wherein the sequence of the first and/or second strand is the sequence of a first and/or second strand of: AD-35604.4 (SEQ ID NOs: 75 and 502), or modified or unmodified variants thereof, wherein the first and/or second strand further comprise up to about 20 additional nucleotides.

[2698] A RNAi agent comprising a first and a second strand, wherein the sequence of the first and/or second strand is the sequence of a first and/or second strand of: AD-35610.4 (SEQ ID NOs: 76 and 503), or modified or unmodified variants thereof, wherein the first and/or second strand further comprise up to about 20 additional nucleotides.

[2699] A RNAi agent comprising a first and a second strand, wherein the sequence of the first and/or second strand is the sequence of a first and/or second strand of: AD-35616.4 (SEQ ID NOs: 77 and 504), or modified or unmodified variants thereof, wherein the first and/or second strand further comprise up to about 20 additional nucleotides.

[2700] A RNAi agent comprising a first and a second strand, wherein the sequence of the first and/or second strand is the sequence of a first and/or second strand of: AD-35575.4 (SEQ ID NOs: 78 and 505), or modified or unmodified variants thereof, wherein the first and/or second strand further comprise up to about 20 additional nucleotides.

[2701] A RNAi agent comprising a first and a second strand, wherein the sequence of the first and/or second strand is the sequence of a first and/or second strand of: AD-35581.4 (SEQ ID NOs: 79 and 506), or modified or unmodified variants thereof, wherein the first and/or second strand further comprise up to about 20 additional nucleotides.

[2702] A RNAi agent comprising a first and a second strand, wherein the sequence of the first and/or second strand is the sequence of a first and/or second strand of: AD-35587.4 (SEQ ID NOs: 80 and 507), or modified or unmodified variants thereof, wherein the first and/or second strand further comprise up to about 20 additional nucleotides.

[2703] A RNAi agent comprising a first and a second strand, wherein the sequence of the first and/or second strand is the sequence of a first and/or second strand of: AD-35593.4 (SEQ ID NOs: 81 and 508), or modified or unmodified variants thereof, wherein the first and/or second strand further comprise up to about 20 additional nucleotides.

[2704] A RNAi agent comprising a first and a second strand, wherein the sequence of the first and/or second strand is the sequence of a first and/or second strand of: AD-35599.4 (SEQ ID NOs: 82 and 509), or modified or unmodified variants thereof, wherein the first and/or second strand further comprise up to about 20 additional nucleotides.

[2705] A RNAi agent comprising a first and a second strand, wherein the sequence of the first and/or second strand is the sequence of a first and/or second strand of: AD-35605.4 (SEQ ID NOs: 83 and 510), or modified or unmodified variants thereof, wherein the first and/or second strand further comprise up to about 20 additional nucleotides.

[2706] A RNAi agent comprising a first and a second strand, wherein the sequence of the first and/or second strand is the sequence of a first and/or second strand of: AD-35611.4 (SEQ ID NOs: 84 and 511), or modified or unmodified variants thereof, wherein the first and/or second strand further comprise A RNAi agent comprising a first and a second strand, wherein the sequence of the first and/or second strand is the sequence of a first and/or second strand of: AD-35617.4 (SEQ ID NOs: 85 and 512), or modified or unmodified variants thereof, wherein the first and/or second strand further comprise up to about 20 additional nucleotides.

[2707] A RNAi agent comprising a first and a second strand, wherein the sequence of the first and/or second strand is the sequence of a first and/or second strand of: AD-35576.4 (SEQ ID NOs: 86 and 513), or modified or unmodified variants thereof, wherein the first and/or second strand further comprise up to about 20 additional nucleotides.

[2708] A RNAi agent comprising a first and a second strand, wherein the sequence of the first and/or second strand is the sequence of a first and/or second strand of: AD-35588.4 (SEQ ID NOs: 87 and 514), or modified or unmodified variants thereof, wherein the first and/or second strand further comprise up to about 20 additional nucleotides.

[2709] A RNAi agent comprising a first and a second strand, wherein the sequence of the first and/or second strand is the sequence of a first and/or second strand of: AD-35667.1 (SEQ ID NOs: 88 and 515), or modified or unmodified variants thereof, wherein the first and/or second strand further comprise up to about 20 additional nucleotides.

[2710] A RNAi agent comprising a first and a second strand, wherein the sequence of the first and/or second strand is the sequence of a first and/or second strand of: AD-35673.1 (SEQ ID NOs: 89 and 516), or modified or unmodified variants thereof, wherein the first and/or second strand further comprise up to about 20 additional nucleotides.

[2711] A RNAi agent comprising a first and a second strand, wherein the sequence of the first and/or second strand is the sequence of a first and/or second strand of: AD-35679.1 (SEQ ID NOs: 90 and 517), or modified or unmodified variants thereof, wherein the first and/or second strand further comprise up to about 20 additional nucleotides.

[2712] A RNAi agent comprising a first and a second strand, wherein the sequence of the first and/or second strand is the sequence of a first and/or second strand of: AD-35685.1 (SEQ ID NOs: 91 and 518), or modified or unmodified variants thereof, wherein the first and/or second strand further comprise up to about 20 additional nucleotides.

[2713] A RNAi agent comprising a first and a second strand, wherein the sequence of the first and/or second strand is the sequence of a first and/or second strand of: AD-35691.1 (SEQ ID NOs: 92 and 519), or modified or unmodified variants thereof, wherein the first and/or second strand further comprise up to about 20 additional nucleotides.

[2714] A RNAi agent comprising a first and a second strand, wherein the sequence of the first and/or second strand is the sequence of a first and/or second strand of: AD-35557.1 (SEQ ID NOs: 93 and 520), or modified or unmodified variants thereof, wherein the first and/or second strand further comprise up to about 20 additional nucleotides.

[2715] A RNAi agent comprising a first and a second strand, wherein the sequence of the first and/or second strand is the sequence of a first and/or second strand of: AD-35618.1 (SEQ ID NOs: 94 and 521), or modified or unmodified variants thereof, wherein the first and/or second strand further comprise A RNAi agent comprising a first and a second strand, wherein the sequence of the first and/or second strand is the sequence of a first and/or second strand of: AD-35569.1 (SEQ ID NOs: 95 and 522), or modified or unmodified variants thereof, wherein the first and/or second strand further comprise up to about 20 additional nucleotides.

[2716] A RNAi agent comprising a first and a second strand, wherein the sequence of the first and/or second strand is the sequence of a first and/or second strand of: AD-35534.1 (SEQ ID NOs: 96 and 523), or modified or unmodified variants thereof, wherein the first and/or second strand further comprise up to about 20 additional nucleotides.

[2717] A RNAi agent comprising a first and a second strand, wherein the sequence of the first and/or second strand is the sequence of a first and/or second strand of: AD-35582.1 (SEQ ID NOs: 97 and 524), or modified or unmodified variants thereof, wherein the first and/or second strand further comprise up to about 20 additional nucleotides.

[2718] A RNAi agent comprising a first and a second strand, wherein the sequence of the first and/or second strand is the sequence of a first and/or second strand of: AD-35594.1 (SEQ ID NOs: 98 and 525), or modified or unmodified variants thereof, wherein the first and/or second strand further comprise up to about 20 additional nucleotides.

[2719] A RNAi agent comprising a first and a second strand, wherein the sequence of the first and/or second strand is the sequence of a first and/or second strand of: AD-35600.1 (SEQ ID NOs: 99 and 526), or modified or unmodified variants thereof, wherein the first and/or second strand further comprise up to about 20 additional nucleotides.

[2720] A RNAi agent comprising a first and a second strand, wherein the sequence of the first and/or second strand is the sequence of a first and/or second strand of: AD-35606.1 (SEQ ID NOs: 100 and 527), or modified or unmodified variants thereof, wherein the first and/or second strand further comprise up to about 20 additional nucleotides.

[2721] A RNAi agent comprising a first and a second strand, wherein the sequence of the first and/or second strand is the sequence of a first and/or second strand of: AD-35612.1 (SEQ ID NOs: 101 and 528), or modified or unmodified variants thereof, wherein the first and/or second strand further comprise up to about 20 additional nucleotides.

[2722] A RNAi agent comprising a first and a second strand, wherein the sequence of the first and/or second strand is the sequence of a first and/or second strand of: AD-38127.1 (SEQ ID NOs: 102 and 529), or modified or unmodified variants thereof, wherein the first and/or second strand further comprise up to about 20 additional nucleotides.

[2723] A RNAi agent comprising a first and a second strand, wherein the sequence of the first and/or second strand is the sequence of a first and/or second strand of: AD-38133.1 (SEQ ID NOs: 103 and 530), or modified or unmodified variants thereof, wherein the first and/or second strand further comprise up to about 20 additional nucleotides.

[2724] A RNAi agent comprising a first and a second strand, wherein the sequence of the first and/or second strand is the sequence of a first and/or second strand of: AD-38139.1 (SEQ ID NOs: 104 and 531), or modified or unmodified variants thereof, wherein the first and/or second strand further comprise A RNAi agent comprising a first and a second strand, wherein the sequence of the first and/or second strand is the sequence of a first and/or second strand of: AD-38145.1 (SEQ ID NOs: 105 and 532), or modified or unmodified variants thereof, wherein the first and/or second strand further comprise up to about 20 additional nucleotides.

[2725] A RNAi agent comprising a first and a second strand, wherein the sequence of the first and/or second strand is the sequence of a first and/or second strand of: AD-38151.1 (SEQ ID NOs: 106 and 533), or modified or unmodified variants thereof, wherein the first and/or second strand further comprise up to about 20 additional nucleotides.

[2726] A RNAi agent comprising a first and a second strand, wherein the sequence of the first and/or second strand is the sequence of a first and/or second strand of: AD-38157.1 (SEQ ID NOs: 107 and 534), or modified or unmodified variants thereof, wherein the first and/or second strand further comprise up to about 20 additional nucleotides.

[2727] A RNAi agent comprising a first and a second strand, wherein the sequence of the first and/or second strand is the sequence of a first and/or second strand of: AD-38163.1 (SEQ ID NOs: 108 and 535), or modified or unmodified variants thereof, wherein the first and/or second strand further comprise up to about 20 additional nucleotides.

[2728] A RNAi agent comprising a first and a second strand, wherein the sequence of the first and/or second strand is the sequence of a first and/or second strand of: AD-38169.1 (SEQ ID NOs: 109 and 536), or modified or unmodified variants thereof, wherein the first and/or second strand further comprise up to about 20 additional nucleotides.

[2729] A RNAi agent comprising a first and a second strand, wherein the sequence of the first and/or second strand is the sequence of a first and/or second strand of: AD-38128.1 (SEQ ID NOs: 110 and 537), or modified or unmodified variants thereof, wherein the first and/or second strand further comprise up to about 20 additional nucleotides.

[2730] A RNAi agent comprising a first and a second strand, wherein the sequence of the first and/or second strand is the sequence of a first and/or second strand of: AD-38134.1 (SEQ ID NOs: 111 and 538), or modified or unmodified variants thereof, wherein the first and/or second strand further comprise up to about 20 additional nucleotides.

[2731] A RNAi agent comprising a first and a second strand, wherein the sequence of the first and/or second strand is the sequence of a first and/or second strand of: AD-38140.1 (SEQ ID NOs: 112 and 539), or modified or unmodified variants thereof, wherein the first and/or second strand further comprise up to about 20 additional nucleotides.

[2732] A RNAi agent comprising a first and a second strand, wherein the sequence of the first and/or second strand is the sequence of a first and/or second strand of: AD-38146.1 (SEQ ID NOs: 113 and 540), or modified or unmodified variants thereof, wherein the first and/or second strand further comprise up to about 20 additional nucleotides.

[2733] A RNAi agent comprising a first and a second strand, wherein the sequence of the first and/or second strand is the sequence of a first and/or second strand of: AD-38152.1 (SEQ ID NOs: 114 and 541), or modified or unmodified variants thereof, wherein the first and/or second strand further comprise A RNAi agent comprising a first and a second strand, wherein the sequence of the first and/or second strand is the sequence of a first and/or second strand of: AD-38158.1 (SEQ ID NOs: 115 and 542), or modified or unmodified variants thereof, wherein the first and/or second strand further comprise up to about 20 additional nucleotides.

[2734] A RNAi agent comprising a first and a second strand, wherein the sequence of the first and/or second strand is the sequence of a first and/or second strand of: AD-38164.1 (SEQ ID NOs: 116 and 543), or modified or unmodified variants thereof, wherein the first and/or second strand further comprise up to about 20 additional nucleotides.

[2735] A RNAi agent comprising a first and a second strand, wherein the sequence of the first and/or second strand is the sequence of a first and/or second strand of: AD-38170.1 (SEQ ID NOs: 117 and 544), or modified or unmodified variants thereof, wherein the first and/or second strand further comprise up to about 20 additional nucleotides.

[2736] A RNAi agent comprising a first and a second strand, wherein the sequence of the first and/or second strand is the sequence of a first and/or second strand of: AD-38129.1 (SEQ ID NOs: 118 and 545), or modified or unmodified variants thereof, wherein the first and/or second strand further comprise up to about 20 additional nucleotides.

[2737] A RNAi agent comprising a first and a second strand, wherein the sequence of the first and/or second strand is the sequence of a first and/or second strand of: AD-38135.1 (SEQ ID NOs: 119 and 546), or modified or unmodified variants thereof, wherein the first and/or second strand further comprise up to about 20 additional nucleotides.

[2738] A RNAi agent comprising a first and a second strand, wherein the sequence of the first and/or second strand is the sequence of a first and/or second strand of: AD-38141.1 (SEQ ID NOs: 120 and 547), or modified or unmodified variants thereof, wherein the first and/or second strand further comprise up to about 20 additional nucleotides.

[2739] A RNAi agent comprising a first and a second strand, wherein the sequence of the first and/or second strand is the sequence of a first and/or second strand of: AD-38147.1 (SEQ ID NOs: 121 and 548), or modified or unmodified variants thereof, wherein the first and/or second strand further comprise up to about 20 additional nucleotides.

[2740] A RNAi agent comprising a first and a second strand, wherein the sequence of the first and/or second strand is the sequence of a first and/or second strand of: AD-38153.1 (SEQ ID NOs: 122 and 549), or modified or unmodified variants thereof, wherein the first and/or second strand further comprise up to about 20 additional nucleotides.

[2741] A RNAi agent comprising a first and a second strand, wherein the sequence of the first and/or second strand is the sequence of a first and/or second strand of: AD-38159.1 (SEQ ID NOs: 123 and 550), or modified or unmodified variants thereof, wherein the first and/or second strand further comprise up to about 20 additional nucleotides.

[2742] A RNAi agent comprising a first and a second strand, wherein the sequence of the first and/or second strand is the sequence of a first and/or second strand of: AD-38165.1 (SEQ ID NOs: 124 and 551), or modified or unmodified variants thereof, wherein the first and/or second strand further comprise A RNAi agent comprising a first and a second strand, wherein the sequence of the first and/or second strand is the sequence of a first and/or second strand of: AD-38171.1 (SEQ ID NOs: 125 and 552), or modified or unmodified variants thereof, wherein the first and/or second strand further comprise up to about 20 additional nucleotides.

[2743] A RNAi agent comprising a first and a second strand, wherein the sequence of the first and/or second strand is the sequence of a first and/or second strand of: AD-38130.1 (SEQ ID NOs: 126 and 553), or modified or unmodified variants thereof, wherein the first and/or second strand further comprise up to about 20 additional nucleotides.

[2744] A RNAi agent comprising a first and a second strand, wherein the sequence of the first and/or second strand is the sequence of a first and/or second strand of: AD-38136.1 (SEQ ID NOs: 127 and 554), or modified or unmodified variants thereof, wherein the first and/or second strand further comprise up to about 20 additional nucleotides.

[2745] A RNAi agent comprising a first and a second strand, wherein the sequence of the first and/or second strand is the sequence of a first and/or second strand of: AD-38142.1 (SEQ ID NOs: 128 and 555), or modified or unmodified variants thereof, wherein the first and/or second strand further comprise up to about 20 additional nucleotides.

[2746] A RNAi agent comprising a first and a second strand, wherein the sequence of the first and/or second strand is the sequence of a first and/or second strand of: AD-38148.1 (SEQ ID NOs: 129 and 556), or modified or unmodified variants thereof, wherein the first and/or second strand further comprise up to about 20 additional nucleotides.

[2747] A RNAi agent comprising a first and a second strand, wherein the sequence of the first and/or second strand is the sequence of a first and/or second strand of: AD-38154.1 (SEQ ID NOs: 130 and 557), or modified or unmodified variants thereof, wherein the first and/or second strand further comprise up to about 20 additional nucleotides.

[2748] A RNAi agent comprising a first and a second strand, wherein the sequence of the first and/or second strand is the sequence of a first and/or second strand of: AD-38160.1 (SEQ ID NOs: 131 and 558), or modified or unmodified variants thereof, wherein the first and/or second strand further comprise up to about 20 additional nucleotides.

[2749] A RNAi agent comprising a first and a second strand, wherein the sequence of the first and/or second strand is the sequence of a first and/or second strand of: AD-38166.1 (SEQ ID NOs: 132 and 559), or modified or unmodified variants thereof, wherein the first and/or second strand further comprise up to about 20 additional nucleotides.

[2750] A RNAi agent comprising a first and a second strand, wherein the sequence of the first and/or second strand is the sequence of a first and/or second strand of: AD-38172.1 (SEQ ID NOs: 133 and 560), or modified or unmodified variants thereof, wherein the first and/or second strand further comprise up to about 20 additional nucleotides.

[2751] A RNAi agent comprising a first and a second strand, wherein the sequence of the first and/or second strand is the sequence of a first and/or second strand of: AD-38131.1 (SEQ ID NOs: 134 and 561), or modified or unmodified variants thereof, wherein the first and/or second strand further comprise A RNAi agent comprising a first and a second strand, wherein the sequence of the first and/or second strand is the sequence of a first and/or second strand of: AD-38137.1 (SEQ ID NOs: 135 and 562), or modified or unmodified variants thereof, wherein the first and/or second strand further comprise up to about 20 additional nucleotides.

[2752] A RNAi agent comprising a first and a second strand, wherein the sequence of the first and/or second strand is the sequence of a first and/or second strand of: AD-38143.1 (SEQ ID NOs: 136 and 563), or modified or unmodified variants thereof, wherein the first and/or second strand further comprise up to about 20 additional nucleotides.

[2753] A RNAi agent comprising a first and a second strand, wherein the sequence of the first and/or second strand is the sequence of a first and/or second strand of: AD-38149.1 (SEQ ID NOs: 137 and 564), or modified or unmodified variants thereof, wherein the first and/or second strand further comprise up to about 20 additional nucleotides.

[2754] A RNAi agent comprising a first and a second strand, wherein the sequence of the first and/or second strand is the sequence of a first and/or second strand of: AD-38155.1 (SEQ ID NOs: 138 and 565), or modified or unmodified variants thereof, wherein the first and/or second strand further comprise up to about 20 additional nucleotides.

[2755] A RNAi agent comprising a first and a second strand, wherein the sequence of the first and/or second strand is the sequence of a first and/or second strand of: AD-38161.1 (SEQ ID NOs: 139 and 566), or modified or unmodified variants thereof, wherein the first and/or second strand further comprise up to about 20 additional nucleotides.

[2756] A RNAi agent comprising a first and a second strand, wherein the sequence of the first and/or second strand is the sequence of a first and/or second strand of: AD-38167.1 (SEQ ID NOs: 140 and 567), or modified or unmodified variants thereof, wherein the first and/or second strand further comprise up to about 20 additional nucleotides.

[2757] A RNAi agent comprising a first and a second strand, wherein the sequence of the first and/or second strand is the sequence of a first and/or second strand of: AD-38173.1 (SEQ ID NOs: 141 and 568), or modified or unmodified variants thereof, wherein the first and/or second strand further comprise up to about 20 additional nucleotides.

[2758] A RNAi agent comprising a first and a second strand, wherein the sequence of the first and/or second strand is the sequence of a first and/or second strand of: AD-38132.1 (SEQ ID NOs: 142 and 569), or modified or unmodified variants thereof, wherein the first and/or second strand further comprise up to about 20 additional nucleotides.

[2759] A RNAi agent comprising a first and a second strand, wherein the sequence of the first and/or second strand is the sequence of a first and/or second strand of: AD-38138.1 (SEQ ID NOs: 143 and 570), or modified or unmodified variants thereof, wherein the first and/or second strand further comprise up to about 20 additional nucleotides.

[2760] A RNAi agent comprising a first and a second strand, wherein the sequence of the first and/or second strand is the sequence of a first and/or second strand of: AD-38144.1 (SEQ ID NOs: 144 and 571), or modified or unmodified variants thereof, wherein the first and/or second strand further comprise A RNAi agent comprising a first and a second strand, wherein the sequence of the first and/or second strand is the sequence of a first and/or second strand of: AD-38150.1 (SEQ ID NOs: 145 and 572), or modified or unmodified variants thereof, wherein the first and/or second strand further comprise up to about 20 additional nucleotides.

[2761] A RNAi agent comprising a first and a second strand, wherein the sequence of the first and/or second strand is the sequence of a first and/or second strand of: AD-38156.1 (SEQ ID NOs: 146 and 573), or modified or unmodified variants thereof, wherein the first and/or second strand further comprise up to about 20 additional nucleotides.

[2762] A RNAi agent comprising a first and a second strand, wherein the sequence of the first and/or second strand is the sequence of a first and/or second strand of: AD-38162.1 (SEQ ID NOs: 147 and 574), or modified or unmodified variants thereof, wherein the first and/or second strand further comprise up to about 20 additional nucleotides.

[2763] A RNAi agent comprising a first and a second strand, wherein the sequence of the first and/or second strand is the sequence of a first and/or second strand of: AD-38168.1 (SEQ ID NOs: 148 and 575), or modified or unmodified variants thereof, wherein the first and/or second strand further comprise up to about 20 additional nucleotides.

[2764] A RNAi agent comprising a first and a second strand, wherein the sequence of the first and/or second strand is the sequence of a first and/or second strand of: AD-38174.1 (SEQ ID NOs: 149 and 576), or modified or unmodified variants thereof, wherein the first and/or second strand further comprise up to about 20 additional nucleotides.

[2765] A RNAi agent comprising a first and a second strand, wherein the sequence of the first and/or second strand is the sequence of a first and/or second strand of: AD-39683.1 (SEQ ID NOs: 150 and 577), or modified or unmodified variants thereof, wherein the first and/or second strand further comprise up to about 20 additional nucleotides.

[2766] A RNAi agent comprising a first and a second strand, wherein the sequence of the first and/or second strand is the sequence of a first and/or second strand of: AD-39689.1 (SEQ ID NOs: 151 and 578), or modified or unmodified variants thereof, wherein the first and/or second strand further comprise up to about 20 additional nucleotides.

[2767] A RNAi agent comprising a first and a second strand, wherein the sequence of the first and/or second strand is the sequence of a first and/or second strand of: AD-39695.1 (SEQ ID NOs: 152 and 579), or modified or unmodified variants thereof, wherein the first and/or second strand further comprise up to about 20 additional nucleotides.

[2768] A RNAi agent comprising a first and a second strand, wherein the sequence of the first and/or second strand is the sequence of a first and/or second strand of: AD-39701.1 (SEQ ID NOs: 153 and 580), or modified or unmodified variants thereof, wherein the first and/or second strand further comprise up to about 20 additional nucleotides.

[2769] A RNAi agent comprising a first and a second strand, wherein the sequence of the first and/or second strand is the sequence of a first and/or second strand of: AD-39707.1 (SEQ ID NOs: 154 and 581), or modified or unmodified variants thereof, wherein the first and/or second strand further comprise A RNAi agent comprising a first and a second strand, wherein the sequence of the first and/or second strand is the sequence of a first and/or second strand of: AD-39713.1 (SEQ ID NOs: 155 and 582), or modified or unmodified variants thereof, wherein the first and/or second strand further comprise up to about 20 additional nucleotides.

[2770] A RNAi agent comprising a first and a second strand, wherein the sequence of the first and/or second strand is the sequence of a first and/or second strand of: AD-39719.1 (SEQ ID NOs: 156 and 583), or modified or unmodified variants thereof, wherein the first and/or second strand further comprise up to about 20 additional nucleotides.

[2771] A RNAi agent comprising a first and a second strand, wherein the sequence of the first and/or second strand is the sequence of a first and/or second strand of: AD-39725.1 (SEQ ID NOs: 157 and 584), or modified or unmodified variants thereof, wherein the first and/or second strand further comprise up to about 20 additional nucleotides.

[2772] A RNAi agent comprising a first and a second strand, wherein the sequence of the first and/or second strand is the sequence of a first and/or second strand of: AD-39684.1 (SEQ ID NOs: 158 and 585), or modified or unmodified variants thereof, wherein the first and/or second strand further comprise up to about 20 additional nucleotides.

[2773] A RNAi agent comprising a first and a second strand, wherein the sequence of the first and/or second strand is the sequence of a first and/or second strand of: AD-39690.1 (SEQ ID NOs: 159 and 586), or modified or unmodified variants thereof, wherein the first and/or second strand further comprise up to about 20 additional nucleotides.

[2774] A RNAi agent comprising a first and a second strand, wherein the sequence of the first and/or second strand is the sequence of a first and/or second strand of: AD-39696.1 (SEQ ID NOs: 160 and 587), or modified or unmodified variants thereof, wherein the first and/or second strand further comprise up to about 20 additional nucleotides.

[2775] A RNAi agent comprising a first and a second strand, wherein the sequence of the first and/or second strand is the sequence of a first and/or second strand of: AD-39702.1 (SEQ ID NOs: 161 and 588), or modified or unmodified variants thereof, wherein the first and/or second strand further comprise up to about 20 additional nucleotides.

[2776] A RNAi agent comprising a first and a second strand, wherein the sequence of the first and/or second strand is the sequence of a first and/or second strand of: AD-39708.1 (SEQ ID NOs: 162 and 589), or modified or unmodified variants thereof, wherein the first and/or second strand further comprise up to about 20 additional nucleotides.

[2777] A RNAi agent comprising a first and a second strand, wherein the sequence of the first and/or second strand is the sequence of a first and/or second strand of: AD-39714.1 (SEQ ID NOs: 163 and 590), or modified or unmodified variants thereof, wherein the first and/or second strand further comprise up to about 20 additional nucleotides.

[2778] A RNAi agent comprising a first and a second strand, wherein the sequence of the first and/or second strand is the sequence of a first and/or second strand of: AD-39720.1 (SEQ ID NOs: 164 and 591), or modified or unmodified variants thereof, wherein the first and/or second strand further comprise A RNAi agent comprising a first and a second strand, wherein the sequence of the first and/or second strand is the sequence of a first and/or second strand of: AD-39726.1 (SEQ ID NOs: 165 and 592), or modified or unmodified variants thereof, wherein the first and/or second strand further comprise up to about 20 additional nucleotides.

[2779] A RNAi agent comprising a first and a second strand, wherein the sequence of the first and/or second strand is the sequence of a first and/or second strand of: AD-39685.1 (SEQ ID NOs: 166 and 593), or modified or unmodified variants thereof, wherein the first and/or second strand further comprise up to about 20 additional nucleotides.

[2780] A RNAi agent comprising a first and a second strand, wherein the sequence of the first and/or second strand is the sequence of a first and/or second strand of: AD-39691.1 (SEQ ID NOs: 167 and 594), or modified or unmodified variants thereof, wherein the first and/or second strand further comprise up to about 20 additional nucleotides.

[2781] A RNAi agent comprising a first and a second strand, wherein the sequence of the first and/or second strand is the sequence of a first and/or second strand of: AD-39697.1 (SEQ ID NOs: 168 and 595), or modified or unmodified variants thereof, wherein the first and/or second strand further comprise up to about 20 additional nucleotides.

[2782] A RNAi agent comprising a first and a second strand, wherein the sequence of the first and/or second strand is the sequence of a first and/or second strand of: AD-39703.1 (SEQ ID NOs: 169 and 596), or modified or unmodified variants thereof, wherein the first and/or second strand further comprise up to about 20 additional nucleotides.

[2783] A RNAi agent comprising a first and a second strand, wherein the sequence of the first and/or second strand is the sequence of a first and/or second strand of: AD-39709.1 (SEQ ID NOs: 170 and 597), or modified or unmodified variants thereof, wherein the first and/or second strand further comprise up to about 20 additional nucleotides.

[2784] A RNAi agent comprising a first and a second strand, wherein the sequence of the first and/or second strand is the sequence of a first and/or second strand of: AD-39715.1 (SEQ ID NOs: 171 and 598), or modified or unmodified variants thereof, wherein the first and/or second strand further comprise up to about 20 additional nucleotides.

[2785] A RNAi agent comprising a first and a second strand, wherein the sequence of the first and/or second strand is the sequence of a first and/or second strand of: AD-39721.1 (SEQ ID NOs: 172 and 599), or modified or unmodified variants thereof, wherein the first and/or second strand further comprise up to about 20 additional nucleotides.

[2786] A RNAi agent comprising a first and a second strand, wherein the sequence of the first and/or second strand is the sequence of a first and/or second strand of: AD-39727.1 (SEQ ID NOs: 173 and 600), or modified or unmodified variants thereof, wherein the first and/or second strand further comprise up to about 20 additional nucleotides.

[2787] A RNAi agent comprising a first and a second strand, wherein the sequence of the first and/or second strand is the sequence of a first and/or second strand of: AD-39686.1 (SEQ ID NOs: 174 and 601), or modified or unmodified variants thereof, wherein the first and/or second strand further comprise A RNAi agent comprising a first and a second strand, wherein the sequence of the first and/or second strand is the sequence of a first and/or second strand of: AD-39692.1 (SEQ ID NOs: 175 and 602), or modified or unmodified variants thereof, wherein the first and/or second strand further comprise up to about 20 additional nucleotides.

[2788] A RNAi agent comprising a first and a second strand, wherein the sequence of the first and/or second strand is the sequence of a first and/or second strand of: AD-39698.1 (SEQ ID NOs: 176 and 603), or modified or unmodified variants thereof, wherein the first and/or second strand further comprise up to about 20 additional nucleotides.

[2789] A RNAi agent comprising a first and a second strand, wherein the sequence of the first and/or second strand is the sequence of a first and/or second strand of: AD-39704.1 (SEQ ID NOs: 177 and 604), or modified or unmodified variants thereof, wherein the first and/or second strand further comprise up to about 20 additional nucleotides.

[2790] A RNAi agent comprising a first and a second strand, wherein the sequence of the first and/or second strand is the sequence of a first and/or second strand of: AD-39710.1 (SEQ ID NOs: 178 and 605), or modified or unmodified variants thereof, wherein the first and/or second strand further comprise up to about 20 additional nucleotides.

[2791] A RNAi agent comprising a first and a second strand, wherein the sequence of the first and/or second strand is the sequence of a first and/or second strand of: AD-39716.1 (SEQ ID NOs: 179 and 606), or modified or unmodified variants thereof, wherein the first and/or second strand further comprise up to about 20 additional nucleotides.

[2792] A RNAi agent comprising a first and a second strand, wherein the sequence of the first and/or second strand is the sequence of a first and/or second strand of: AD-39722.1 (SEQ ID NOs: 180 and 607), or modified or unmodified variants thereof, wherein the first and/or second strand further comprise up to about 20 additional nucleotides.

[2793] A RNAi agent comprising a first and a second strand, wherein the sequence of the first and/or second strand is the sequence of a first and/or second strand of: AD-39728.1 (SEQ ID NOs: 181 and 608), or modified or unmodified variants thereof, wherein the first and/or second strand further comprise up to about 20 additional nucleotides.

[2794] A RNAi agent comprising a first and a second strand, wherein the sequence of the first and/or second strand is the sequence of a first and/or second strand of: AD-39687.1 (SEQ ID NOs: 182 and 609), or modified or unmodified variants thereof, wherein the first and/or second strand further comprise up to about 20 additional nucleotides.

[2795] A RNAi agent comprising a first and a second strand, wherein the sequence of the first and/or second strand is the sequence of a first and/or second strand of: AD-39693.1 (SEQ ID NOs: 183 and 610), or modified or unmodified variants thereof, wherein the first and/or second strand further comprise up to about 20 additional nucleotides.

[2796] A RNAi agent comprising a first and a second strand, wherein the sequence of the first and/or second strand is the sequence of a first and/or second strand of: AD-39699.1 (SEQ ID NOs: 184 and 611), or modified or unmodified variants thereof, wherein the first and/or second strand further comprise A RNAi agent comprising a first and a second strand, wherein the sequence of the first and/or second strand is the sequence of a first and/or second strand of: AD-39705.1 (SEQ ID NOs: 185 and 612), or modified or unmodified variants thereof, wherein the first and/or second strand further comprise up to about 20 additional nucleotides.

[2797] A RNAi agent comprising a first and a second strand, wherein the sequence of the first and/or second strand is the sequence of a first and/or second strand of: AD-39711.1 (SEQ ID NOs: 186 and 613), or modified or unmodified variants thereof, wherein the first and/or second strand further comprise up to about 20 additional nucleotides.

[2798] A RNAi agent comprising a first and a second strand, wherein the sequence of the first and/or second strand is the sequence of a first and/or second strand of: AD-39717.1 (SEQ ID NOs: 187 and 614), or modified or unmodified variants thereof, wherein the first and/or second strand further comprise up to about 20 additional nucleotides.

[2799] A RNAi agent comprising a first and a second strand, wherein the sequence of the first and/or second strand is the sequence of a first and/or second strand of: AD-39723.1 (SEQ ID NOs: 188 and 615), or modified or unmodified variants thereof, wherein the first and/or second strand further comprise up to about 20 additional nucleotides.

[2800] A RNAi agent comprising a first and a second strand, wherein the sequence of the first and/or second strand is the sequence of a first and/or second strand of: AD-39729.1 (SEQ ID NOs: 189 and 616), or modified or unmodified variants thereof, wherein the first and/or second strand further comprise up to about 20 additional nucleotides.

[2801] A RNAi agent comprising a first and a second strand, wherein the sequence of the first and/or second strand is the sequence of a first and/or second strand of: AD-39688.1 (SEQ ID NOs: 190 and 617), or modified or unmodified variants thereof, wherein the first and/or second strand further comprise up to about 20 additional nucleotides.

[2802] A RNAi agent comprising a first and a second strand, wherein the sequence of the first and/or second strand is the sequence of a first and/or second strand of: AD-39694.1 (SEQ ID NOs: 191 and 618), or modified or unmodified variants thereof, wherein the first and/or second strand further comprise up to about 20 additional nucleotides.

[2803] A RNAi agent comprising a first and a second strand, wherein the sequence of the first and/or second strand is the sequence of a first and/or second strand of: AD-39700.1 (SEQ ID NOs: 192 and 619), or modified or unmodified variants thereof, wherein the first and/or second strand further comprise up to about 20 additional nucleotides.

[2804] A RNAi agent comprising a first and a second strand, wherein the sequence of the first and/or second strand is the sequence of a first and/or second strand of: AD-39706.1 (SEQ ID NOs: 193 and 620), or modified or unmodified variants thereof, wherein the first and/or second strand further comprise up to about 20 additional nucleotides.

[2805] A RNAi agent comprising a first and a second strand, wherein the sequence of the first and/or second strand is the sequence of a first and/or second strand of: AD-39712.1 (SEQ ID NOs: 194 and 621), or modified or unmodified variants thereof, wherein the first and/or second strand further comprise A RNAi agent comprising a first and a second strand, wherein the sequence of the first and/or second strand is the sequence of a first and/or second strand of: AD-39718.1 (SEQ ID NOs: 195 and 622), or modified or unmodified variants thereof, wherein the first and/or second strand further comprise up to about 20 additional nucleotides.

[2806] A RNAi agent comprising a first and a second strand, wherein the sequence of the first and/or second strand is the sequence of a first and/or second strand of: AD-39724.1 (SEQ ID NOs: 196 and 623), or modified or unmodified variants thereof, wherein the first and/or second strand further comprise up to about 20 additional nucleotides.

[2807] A RNAi agent comprising a first and a second strand, wherein the sequence of the first and/or second strand is the sequence of a first and/or second strand of: AD-39730.1 (SEQ ID NOs: 197 and 624), or modified or unmodified variants thereof, wherein the first and/or second strand further comprise up to about 20 additional nucleotides.

[2808] A RNAi agent comprising a first and a second strand, wherein the sequence of the first and/or second strand is the sequence of a first and/or second strand of: AD-39736.1 (SEQ ID NOs: 198 and 625), or modified or unmodified variants thereof, wherein the first and/or second strand further comprise up to about 20 additional nucleotides.

[2809] A RNAi agent comprising a first and a second strand, wherein the sequence of the first and/or second strand is the sequence of a first and/or second strand of: AD-39742.1 (SEQ ID NOs: 199 and 626), or modified or unmodified variants thereof, wherein the first and/or second strand further comprise up to about 20 additional nucleotides.

[2810] A RNAi agent comprising a first and a second strand, wherein the sequence of the first and/or second strand is the sequence of a first and/or second strand of: AD-39748.1 (SEQ ID NOs: 200 and 627), or modified or unmodified variants thereof, wherein the first and/or second strand further comprise up to about 20 additional nucleotides.

[2811] A RNAi agent comprising a first and a second strand, wherein the sequence of the first and/or second strand is the sequence of a first and/or second strand of: AD-39754.1 (SEQ ID NOs: 201 and 628), or modified or unmodified variants thereof, wherein the first and/or second strand further comprise up to about 20 additional nucleotides.

[2812] A RNAi agent comprising a first and a second strand, wherein the sequence of the first and/or second strand is the sequence of a first and/or second strand of: AD-39760.1 (SEQ ID NOs: 202 and 629), or modified or unmodified variants thereof, wherein the first and/or second strand further comprise up to about 20 additional nucleotides.

[2813] A RNAi agent comprising a first and a second strand, wherein the sequence of the first and/or second strand is the sequence of a first and/or second strand of: AD-39766.1 (SEQ ID NOs: 203 and 630), or modified or unmodified variants thereof, wherein the first and/or second strand further comprise up to about 20 additional nucleotides.

[2814] A RNAi agent comprising a first and a second strand, wherein the sequence of the first and/or second strand is the sequence of a first and/or second strand of: AD-39772.1 (SEQ ID NOs: 204 and 631), or modified or unmodified variants thereof, wherein the first and/or second strand further comprise A RNAi agent comprising a first and a second strand, wherein the sequence of the first and/or second strand is the sequence of a first and/or second strand of: AD-39731.1 (SEQ ID NOs: 205 and 632), or modified or unmodified variants thereof, wherein the first and/or second strand further comprise up to about 20 additional nucleotides.

[2815] A RNAi agent comprising a first and a second strand, wherein the sequence of the first and/or second strand is the sequence of a first and/or second strand of: AD-39737.1 (SEQ ID NOs: 206 and 633), or modified or unmodified variants thereof, wherein the first and/or second strand further comprise up to about 20 additional nucleotides.

[2816] A RNAi agent comprising a first and a second strand, wherein the sequence of the first and/or second strand is the sequence of a first and/or second strand of: AD-39743.1 (SEQ ID NOs: 207 and 634), or modified or unmodified variants thereof, wherein the first and/or second strand further comprise up to about 20 additional nucleotides.

[2817] A RNAi agent comprising a first and a second strand, wherein the sequence of the first and/or second strand is the sequence of a first and/or second strand of: AD-39749.1 (SEQ ID NOs: 208 and 635), or modified or unmodified variants thereof, wherein the first and/or second strand further comprise up to about 20 additional nucleotides.

[2818] A RNAi agent comprising a first and a second strand, wherein the sequence of the first and/or second strand is the sequence of a first and/or second strand of: AD-39755.1 (SEQ ID NOs: 209 and 636), or modified or unmodified variants thereof, wherein the first and/or second strand further comprise up to about 20 additional nucleotides.

[2819] A RNAi agent comprising a first and a second strand, wherein the sequence of the first and/or second strand is the sequence of a first and/or second strand of: AD-39761.1 (SEQ ID NOs: 210 and 637), or modified or unmodified variants thereof, wherein the first and/or second strand further comprise up to about 20 additional nucleotides.

[2820] A RNAi agent comprising a first and a second strand, wherein the sequence of the first and/or second strand is the sequence of a first and/or second strand of: AD-39767.1 (SEQ ID NOs: 211 and 638), or modified or unmodified variants thereof, wherein the first and/or second strand further comprise up to about 20 additional nucleotides.

[2821] A RNAi agent comprising a first and a second strand, wherein the sequence of the first and/or second strand is the sequence of a first and/or second strand of: AD-39773.1 (SEQ ID NOs: 212 and 639), or modified or unmodified variants thereof, wherein the first and/or second strand further comprise up to about 20 additional nucleotides.

[2822] A RNAi agent comprising a first and a second strand, wherein the sequence of the first and/or second strand is the sequence of a first and/or second strand of: AD-39732.1 (SEQ ID NOs: 213 and 640), or modified or unmodified variants thereof, wherein the first and/or second strand further comprise up to about 20 additional nucleotides.

[2823] A RNAi agent comprising a first and a second strand, wherein the sequence of the first and/or second strand is the sequence of a first and/or second strand of: AD-39738.1 (SEQ ID NOs: 214 and 641), or modified or unmodified variants thereof, wherein the first and/or second strand further comprise A RNAi agent comprising a first and a second strand, wherein the sequence of the first and/or second strand is the sequence of a first and/or second strand of: AD-39744.1 (SEQ ID NOs: 215 and 642), or modified or unmodified variants thereof, wherein the first and/or second strand further comprise up to about 20 additional nucleotides.

[2824] A RNAi agent comprising a first and a second strand, wherein the sequence of the first and/or second strand is the sequence of a first and/or second strand of: AD-39750.1 (SEQ ID NOs: 216 and 643), or modified or unmodified variants thereof, wherein the first and/or second strand further comprise up to about 20 additional nucleotides.

[2825] A RNAi agent comprising a first and a second strand, wherein the sequence of the first and/or second strand is the sequence of a first and/or second strand of: AD-39756.1 (SEQ ID NOs: 217 and 644), or modified or unmodified variants thereof, wherein the first and/or second strand further comprise up to about 20 additional nucleotides.

[2826] A RNAi agent comprising a first and a second strand, wherein the sequence of the first and/or second strand is the sequence of a first and/or second strand of: AD-39762.1 (SEQ ID NOs: 218 and 645), or modified or unmodified variants thereof, wherein the first and/or second strand further comprise up to about 20 additional nucleotides.

[2827] A RNAi agent comprising a first and a second strand, wherein the sequence of the first and/or second strand is the sequence of a first and/or second strand of: AD-39768.1 (SEQ ID NOs: 219 and 646), or modified or unmodified variants thereof, wherein the first and/or second strand further comprise up to about 20 additional nucleotides.

[2828] A RNAi agent comprising a first and a second strand, wherein the sequence of the first and/or second strand is the sequence of a first and/or second strand of: AD-39774.1 (SEQ ID NOs: 220 and 647), or modified or unmodified variants thereof, wherein the first and/or second strand further comprise up to about 20 additional nucleotides.

[2829] A RNAi agent comprising a first and a second strand, wherein the sequence of the first and/or second strand is the sequence of a first and/or second strand of: AD-39733.1 (SEQ ID NOs: 221 and 648), or modified or unmodified variants thereof, wherein the first and/or second strand further comprise up to about 20 additional nucleotides.

[2830] A RNAi agent comprising a first and a second strand, wherein the sequence of the first and/or second strand is the sequence of a first and/or second strand of: AD-39739.1 (SEQ ID NOs: 222 and 649), or modified or unmodified variants thereof, wherein the first and/or second strand further comprise up to about 20 additional nucleotides.

[2831] A RNAi agent comprising a first and a second strand, wherein the sequence of the first and/or second strand is the sequence of a first and/or second strand of: AD-39745.1 (SEQ ID NOs: 223 and 650), or modified or unmodified variants thereof, wherein the first and/or second strand further comprise up to about 20 additional nucleotides.

[2832] A RNAi agent comprising a first and a second strand, wherein the sequence of the first and/or second strand is the sequence of a first and/or second strand of: AD-39751.1 (SEQ ID NOs: 224 and 651), or modified or unmodified variants thereof, wherein the first and/or second strand further comprise A RNAi agent comprising a first and a second strand, wherein the sequence of the first and/or second strand is the sequence of a first and/or second strand of: AD-39757.1 (SEQ ID NOs: 225 and 652), or modified or unmodified variants thereof, wherein the first and/or second strand further comprise up to about 20 additional nucleotides.

[2833] A RNAi agent comprising a first and a second strand, wherein the sequence of the first and/or second strand is the sequence of a first and/or second strand of: AD-39763.1 (SEQ ID NOs: 226 and 653), or modified or unmodified variants thereof, wherein the first and/or second strand further comprise up to about 20 additional nucleotides.

[2834] A RNAi agent comprising a first and a second strand, wherein the sequence of the first and/or second strand is the sequence of a first and/or second strand of: AD-39769.1 (SEQ ID NOs: 227 and 654), or modified or unmodified variants thereof, wherein the first and/or second strand further comprise up to about 20 additional nucleotides.

[2835] A RNAi agent comprising a first and a second strand, wherein the sequence of the first and/or second strand is the sequence of a first and/or second strand of: AD-39775.1 (SEQ ID NOs: 228 and 655), or modified or unmodified variants thereof, wherein the first and/or second strand further comprise up to about 20 additional nucleotides.

[2836] A RNAi agent comprising a first and a second strand, wherein the sequence of the first and/or second strand is the sequence of a first and/or second strand of: AD-39734.1 (SEQ ID NOs: 229 and 656), or modified or unmodified variants thereof, wherein the first and/or second strand further comprise up to about 20 additional nucleotides.

[2837] A RNAi agent comprising a first and a second strand, wherein the sequence of the first and/or second strand is the sequence of a first and/or second strand of: AD-39740.1 (SEQ ID NOs: 230 and 657), or modified or unmodified variants thereof, wherein the first and/or second strand further comprise up to about 20 additional nucleotides.

[2838] A RNAi agent comprising a first and a second strand, wherein the sequence of the first and/or second strand is the sequence of a first and/or second strand of: AD-39746.1 (SEQ ID NOs: 231 and 658), or modified or unmodified variants thereof, wherein the first and/or second strand further comprise up to about 20 additional nucleotides.

[2839] A RNAi agent comprising a first and a second strand, wherein the sequence of the first and/or second strand is the sequence of a first and/or second strand of: AD-39752.1 (SEQ ID NOs: 232 and 659), or modified or unmodified variants thereof, wherein the first and/or second strand further comprise up to about 20 additional nucleotides.

[2840] A RNAi agent comprising a first and a second strand, wherein the sequence of the first and/or second strand is the sequence of a first and/or second strand of: AD-39758.1 (SEQ ID NOs: 233 and 660), or modified or unmodified variants thereof, wherein the first and/or second strand further comprise up to about 20 additional nucleotides.

[2841] A RNAi agent comprising a first and a second strand, wherein the sequence of the first and/or second strand is the sequence of a first and/or second strand of: AD-39764.1 (SEQ ID NOs: 234 and 661), or modified or unmodified variants thereof, wherein the first and/or second strand further comprise A RNAi agent comprising a first and a second strand, wherein the sequence of the first and/or second strand is the sequence of a first and/or second strand of: AD-39770.1 (SEQ ID NOs: 235 and 662), or modified or unmodified variants thereof, wherein the first and/or second strand further comprise up to about 20 additional nucleotides.

[2842] A RNAi agent comprising a first and a second strand, wherein the sequence of the first and/or second strand is the sequence of a first and/or second strand of: AD-39776.1 (SEQ ID NOs: 236 and 663), or modified or unmodified variants thereof, wherein the first and/or second strand further comprise up to about 20 additional nucleotides.

[2843] A RNAi agent comprising a first and a second strand, wherein the sequence of the first and/or second strand is the sequence of a first and/or second strand of: AD-39735.1 (SEQ ID NOs: 237 and 664), or modified or unmodified variants thereof, wherein the first and/or second strand further comprise up to about 20 additional nucleotides.

[2844] A RNAi agent comprising a first and a second strand, wherein the sequence of the first and/or second strand is the sequence of a first and/or second strand of: AD-39741.1 (SEQ ID NOs: 238 and 665), or modified or unmodified variants thereof, wherein the first and/or second strand further comprise up to about 20 additional nucleotides.

[2845] A RNAi agent comprising a first and a second strand, wherein the sequence of the first and/or second strand is the sequence of a first and/or second strand of: AD-39747.1 (SEQ ID NOs: 239 and 666), or modified or unmodified variants thereof, wherein the first and/or second strand further comprise up to about 20 additional nucleotides.

[2846] A RNAi agent comprising a first and a second strand, wherein the sequence of the first and/or second strand is the sequence of a first and/or second strand of: AD-39753.1 (SEQ ID NOs: 240 and 667), or modified or unmodified variants thereof, wherein the first and/or second strand further comprise up to about 20 additional nucleotides.

[2847] A RNAi agent comprising a first and a second strand, wherein the sequence of the first and/or second strand is the sequence of a first and/or second strand of: AD-39759.1 (SEQ ID NOs: 241 and 668), or modified or unmodified variants thereof, wherein the first and/or second strand further comprise up to about 20 additional nucleotides.

[2848] A RNAi agent comprising a first and a second strand, wherein the sequence of the first and/or second strand is the sequence of a first and/or second strand of: AD-39765.1 (SEQ ID NOs: 242 and 669), or modified or unmodified variants thereof, wherein the first and/or second strand further comprise up to about 20 additional nucleotides.

[2849] A RNAi agent comprising a first and a second strand, wherein the sequence of the first and/or second strand is the sequence of a first and/or second strand of: AD-39771.1 (SEQ ID NOs: 243 and 670), or modified or unmodified variants thereof, wherein the first and/or second strand further comprise up to about 20 additional nucleotides.

[2850] A RNAi agent comprising a first and a second strand, wherein the sequence of the first and/or second strand is the sequence of a first and/or second strand of: AD-39778.1 (SEQ ID NOs: 244 and 671), or modified or unmodified variants thereof, wherein the first and/or second strand further comprise A RNAi agent comprising a first and a second strand, wherein the sequence of the first and/or second strand is the sequence of a first and/or second strand of: AD-39784.1 (SEQ ID NOs: 245 and 672), or modified or unmodified variants thereof, wherein the first and/or second strand further comprise up to about 20 additional nucleotides.

[2851] A RNAi agent comprising a first and a second strand, wherein the sequence of the first and/or second strand is the sequence of a first and/or second strand of: AD-39790.1 (SEQ ID NOs: 246 and 673), or modified or unmodified variants thereof, wherein the first and/or second strand further comprise up to about 20 additional nucleotides.

[2852] A RNAi agent comprising a first and a second strand, wherein the sequence of the first and/or second strand is the sequence of a first and/or second strand of: AD-39796.1 (SEQ ID NOs: 247 and 674), or modified or unmodified variants thereof, wherein the first and/or second strand further comprise up to about 20 additional nucleotides.

[2853] A RNAi agent comprising a first and a second strand, wherein the sequence of the first and/or second strand is the sequence of a first and/or second strand of: AD-39802.1 (SEQ ID NOs: 248 and 675), or modified or unmodified variants thereof, wherein the first and/or second strand further comprise up to about 20 additional nucleotides.

[2854] A RNAi agent comprising a first and a second strand, wherein the sequence of the first and/or second strand is the sequence of a first and/or second strand of: AD-39808.1 (SEQ ID NOs: 249 and 676), or modified or unmodified variants thereof, wherein the first and/or second strand further comprise up to about 20 additional nucleotides.

[2855] A RNAi agent comprising a first and a second strand, wherein the sequence of the first and/or second strand is the sequence of a first and/or second strand of: AD-39814.1 (SEQ ID NOs: 250 and 677), or modified or unmodified variants thereof, wherein the first and/or second strand further comprise up to about 20 additional nucleotides.

[2856] A RNAi agent comprising a first and a second strand, wherein the sequence of the first and/or second strand is the sequence of a first and/or second strand of: AD-39820.1 (SEQ ID NOs: 251 and 678), or modified or unmodified variants thereof, wherein the first and/or second strand further comprise up to about 20 additional nucleotides.

[2857] A RNAi agent comprising a first and a second strand, wherein the sequence of the first and/or second strand is the sequence of a first and/or second strand of: AD-39779.1 (SEQ ID NOs: 252 and 679), or modified or unmodified variants thereof, wherein the first and/or second strand further comprise up to about 20 additional nucleotides.

[2858] A RNAi agent comprising a first and a second strand, wherein the sequence of the first and/or second strand is the sequence of a first and/or second strand of: AD-39785.1 (SEQ ID NOs: 253 and 680), or modified or unmodified variants thereof, wherein the first and/or second strand further comprise up to about 20 additional nucleotides.

[2859] A RNAi agent comprising a first and a second strand, wherein the sequence of the first and/or second strand is the sequence of a first and/or second strand of: AD-39791.1 (SEQ ID NOs: 254 and 681), or modified or unmodified variants thereof, wherein the first and/or second strand further comprise A RNAi agent comprising a first and a second strand, wherein the sequence of the first and/or second strand is the sequence of a first and/or second strand of: AD-39797.1 (SEQ ID NOs: 255 and 682), or modified or unmodified variants thereof, wherein the first and/or second strand further comprise up to about 20 additional nucleotides.

[2860] A RNAi agent comprising a first and a second strand, wherein the sequence of the first and/or second strand is the sequence of a first and/or second strand of: AD-39803.1 (SEQ ID NOs: 256 and 683), or modified or unmodified variants thereof, wherein the first and/or second strand further comprise up to about 20 additional nucleotides.

[2861] A RNAi agent comprising a first and a second strand, wherein the sequence of the first and/or second strand is the sequence of a first and/or second strand of: AD-39809.1 (SEQ ID NOs: 257 and 684), or modified or unmodified variants thereof, wherein the first and/or second strand further comprise up to about 20 additional nucleotides.

[2862] A RNAi agent comprising a first and a second strand, wherein the sequence of the first and/or second strand is the sequence of a first and/or second strand of: AD-39815.1 (SEQ ID NOs: 258 and 685), or modified or unmodified variants thereof, wherein the first and/or second strand further comprise up to about 20 additional nucleotides.

[2863] A RNAi agent comprising a first and a second strand, wherein the sequence of the first and/or second strand is the sequence of a first and/or second strand of: AD-39821.1 (SEQ ID NOs: 259 and 686), or modified or unmodified variants thereof, wherein the first and/or second strand further comprise up to about 20 additional nucleotides.

[2864] A RNAi agent comprising a first and a second strand, wherein the sequence of the first and/or second strand is the sequence of a first and/or second strand of: AD-39780.1 (SEQ ID NOs: 260 and 687), or modified or unmodified variants thereof, wherein the first and/or second strand further comprise up to about 20 additional nucleotides.

[2865] A RNAi agent comprising a first and a second strand, wherein the sequence of the first and/or second strand is the sequence of a first and/or second strand of: AD-39786.1 (SEQ ID NOs: 261 and 688), or modified or unmodified variants thereof, wherein the first and/or second strand further comprise up to about 20 additional nucleotides.

[2866] A RNAi agent comprising a first and a second strand, wherein the sequence of the first and/or second strand is the sequence of a first and/or second strand of: AD-39792.1 (SEQ ID NOs: 262 and 689), or modified or unmodified variants thereof, wherein the first and/or second strand further comprise up to about 20 additional nucleotides.

[2867] A RNAi agent comprising a first and a second strand, wherein the sequence of the first and/or second strand is the sequence of a first and/or second strand of: AD-39798.1 (SEQ ID NOs: 263 and 690), or modified or unmodified variants thereof, wherein the first and/or second strand further comprise up to about 20 additional nucleotides.

[2868] A RNAi agent comprising a first and a second strand, wherein the sequence of the first and/or second strand is the sequence of a first and/or second strand of: AD-39804.1 (SEQ ID NOs: 264 and 691), or modified or unmodified variants thereof, wherein the first and/or second strand further comprise A RNAi agent comprising a first and a second strand, wherein the sequence of the first and/or second strand is the sequence of a first and/or second strand of: AD-39810.1 (SEQ ID NOs: 265 and 692), or modified or unmodified variants thereof, wherein the first and/or second strand further comprise up to about 20 additional nucleotides.

[2869] A RNAi agent comprising a first and a second strand, wherein the sequence of the first and/or second strand is the sequence of a first and/or second strand of: AD-39816.1 (SEQ ID NOs: 266 and 693), or modified or unmodified variants thereof, wherein the first and/or second strand further comprise up to about 20 additional nucleotides.

[2870] A RNAi agent comprising a first and a second strand, wherein the sequence of the first and/or second strand is the sequence of a first and/or second strand of: AD-39822.1 (SEQ ID NOs: 267 and 694), or modified or unmodified variants thereof, wherein the first and/or second strand further comprise up to about 20 additional nucleotides.

[2871] A RNAi agent comprising a first and a second strand, wherein the sequence of the first and/or second strand is the sequence of a first and/or second strand of: AD-39781.1 (SEQ ID NOs: 268 and 695), or modified or unmodified variants thereof, wherein the first and/or second strand further comprise up to about 20 additional nucleotides.

[2872] A RNAi agent comprising a first and a second strand, wherein the sequence of the first and/or second strand is the sequence of a first and/or second strand of: AD-39787.1 (SEQ ID NOs: 269 and 696), or modified or unmodified variants thereof, wherein the first and/or second strand further comprise up to about 20 additional nucleotides.

[2873] A RNAi agent comprising a first and a second strand, wherein the sequence of the first and/or second strand is the sequence of a first and/or second strand of: AD-39793.1 (SEQ ID NOs: 270 and 697), or modified or unmodified variants thereof, wherein the first and/or second strand further comprise up to about 20 additional nucleotides.

[2874] A RNAi agent comprising a first and a second strand, wherein the sequence of the first and/or second strand is the sequence of a first and/or second strand of: AD-39799.1 (SEQ ID NOs: 271 and 698), or modified or unmodified variants thereof, wherein the first and/or second strand further comprise up to about 20 additional nucleotides.

[2875] A RNAi agent comprising a first and a second strand, wherein the sequence of the first and/or second strand is the sequence of a first and/or second strand of: AD-39805.1 (SEQ ID NOs: 272 and 699), or modified or unmodified variants thereof, wherein the first and/or second strand further comprise up to about 20 additional nucleotides.

[2876] A RNAi agent comprising a first and a second strand, wherein the sequence of the first and/or second strand is the sequence of a first and/or second strand of: AD-39811.1 (SEQ ID NOs: 273 and 700), or modified or unmodified variants thereof, wherein the first and/or second strand further comprise up to about 20 additional nucleotides.

[2877] A RNAi agent comprising a first and a second strand, wherein the sequence of the first and/or second strand is the sequence of a first and/or second strand of: AD-39817.1 (SEQ ID NOs: 274 and 701), or modified or unmodified variants thereof, wherein the first and/or second strand further comprise A RNAi agent comprising a first and a second strand, wherein the sequence of the first and/or second strand is the sequence of a first and/or second strand of: AD-39823.1 (SEQ ID NOs: 275 and 702), or modified or unmodified variants thereof, wherein the first and/or second strand further comprise up to about 20 additional nucleotides.

[2878] A RNAi agent comprising a first and a second strand, wherein the sequence of the first and/or second strand is the sequence of a first and/or second strand of: AD-39782.1 (SEQ ID NOs: 276 and 703), or modified or unmodified variants thereof, wherein the first and/or second strand further comprise up to about 20 additional nucleotides.

[2879] A RNAi agent comprising a first and a second strand, wherein the sequence of the first and/or second strand is the sequence of a first and/or second strand of: AD-39788.1 (SEQ ID NOs: 277 and 704), or modified or unmodified variants thereof, wherein the first and/or second strand further comprise up to about 20 additional nucleotides.

[2880] A RNAi agent comprising a first and a second strand, wherein the sequence of the first and/or second strand is the sequence of a first and/or second strand of: AD-39794.1 (SEQ ID NOs: 278 and 705), or modified or unmodified variants thereof, wherein the first and/or second strand further comprise up to about 20 additional nucleotides.

[2881] A RNAi agent comprising a first and a second strand, wherein the sequence of the first and/or second strand is the sequence of a first and/or second strand of: AD-39800.1 (SEQ ID NOs: 279 and 706), or modified or unmodified variants thereof, wherein the first and/or second strand further comprise up to about 20 additional nucleotides.

[2882] A RNAi agent comprising a first and a second strand, wherein the sequence of the first and/or second strand is the sequence of a first and/or second strand of: AD-39806.1 (SEQ ID NOs: 280 and 707), or modified or unmodified variants thereof, wherein the first and/or second strand further comprise up to about 20 additional nucleotides.

[2883] A RNAi agent comprising a first and a second strand, wherein the sequence of the first and/or second strand is the sequence of a first and/or second strand of: AD-39812.1 (SEQ ID NOs: 281 and 708), or modified or unmodified variants thereof, wherein the first and/or second strand further comprise up to about 20 additional nucleotides.

[2884] A RNAi agent comprising a first and a second strand, wherein the sequence of the first and/or second strand is the sequence of a first and/or second strand of: AD-39818.1 (SEQ ID NOs: 282 and 709), or modified or unmodified variants thereof, wherein the first and/or second strand further comprise up to about 20 additional nucleotides.

[2885] A RNAi agent comprising a first and a second strand, wherein the sequence of the first and/or second strand is the sequence of a first and/or second strand of: AD-39824.1 (SEQ ID NOs: 283 and 710), or modified or unmodified variants thereof, wherein the first and/or second strand further comprise up to about 20 additional nucleotides.

[2886] A RNAi agent comprising a first and a second strand, wherein the sequence of the first and/or second strand is the sequence of a first and/or second strand of: AD-39783.1 (SEQ ID NOs: 284 and 711), or modified or unmodified variants thereof, wherein the first and/or second strand further comprise A RNAi agent comprising a first and a second strand, wherein the sequence of the first and/or second strand is the sequence of a first and/or second strand of: AD-39789.1 (SEQ ID NOs: 285 and 712), or modified or unmodified variants thereof, wherein the first and/or second strand further comprise up to about 20 additional nucleotides.

[2887] A RNAi agent comprising a first and a second strand, wherein the sequence of the first and/or second strand is the sequence of a first and/or second strand of: AD-39795.1 (SEQ ID NOs: 286 and 713), or modified or unmodified variants thereof, wherein the first and/or second strand further comprise up to about 20 additional nucleotides.

[2888] A RNAi agent comprising a first and a second strand, wherein the sequence of the first and/or second strand is the sequence of a first and/or second strand of: AD-39801.1 (SEQ ID NOs: 287 and 714), or modified or unmodified variants thereof, wherein the first and/or second strand further comprise up to about 20 additional nucleotides.

[2889] A RNAi agent comprising a first and a second strand, wherein the sequence of the first and/or second strand is the sequence of a first and/or second strand of: AD-39807.1 (SEQ ID NOs: 288 and 715), or modified or unmodified variants thereof, wherein the first and/or second strand further comprise up to about 20 additional nucleotides.

[2890] A RNAi agent comprising a first and a second strand, wherein the sequence of the first and/or second strand is the sequence of a first and/or second strand of: AD-39813.1 (SEQ ID NOs: 289 and 716), or modified or unmodified variants thereof, wherein the first and/or second strand further comprise up to about 20 additional nucleotides.

[2891] A RNAi agent comprising a first and a second strand, wherein the sequence of the first and/or second strand is the sequence of a first and/or second strand of: AD-39819.1 (SEQ ID NOs: 290 and 717), or modified or unmodified variants thereof, wherein the first and/or second strand further comprise up to about 20 additional nucleotides.

[2892] A RNAi agent comprising a first and a second strand, wherein the sequence of the first and/or second strand is the sequence of a first and/or second strand of: AD-39825.1 (SEQ ID NOs: 291 and 718), or modified or unmodified variants thereof, wherein the first and/or second strand further comprise up to about 20 additional nucleotides.

[2893] A RNAi agent comprising a first and a second strand, wherein the sequence of the first and/or second strand is the sequence of a first and/or second strand of: AD-39831.1 (SEQ ID NOs: 292 and 719), or modified or unmodified variants thereof, wherein the first and/or second strand further comprise up to about 20 additional nucleotides.

[2894] A RNAi agent comprising a first and a second strand, wherein the sequence of the first and/or second strand is the sequence of a first and/or second strand of: AD-39837.1 (SEQ ID NOs: 293 and 720), or modified or unmodified variants thereof, wherein the first and/or second strand further comprise up to about 20 additional nucleotides.

[2895] A RNAi agent comprising a first and a second strand, wherein the sequence of the first and/or second strand is the sequence of a first and/or second strand of: AD-39843.1 (SEQ ID NOs: 294 and 721), or modified or unmodified variants thereof, wherein the first and/or second strand further comprise A RNAi agent comprising a first and a second strand, wherein the sequence of the first and/or second strand is the sequence of a first and/or second strand of: AD-39849.1 (SEQ ID NOs: 295 and 722), or modified or unmodified variants thereof, wherein the first and/or second strand further comprise up to about 20 additional nucleotides.

[2896] A RNAi agent comprising a first and a second strand, wherein the sequence of the first and/or second strand is the sequence of a first and/or second strand of: AD-39855.1 (SEQ ID NOs: 296 and 723), or modified or unmodified variants thereof, wherein the first and/or second strand further comprise up to about 20 additional nucleotides.

[2897] A RNAi agent comprising a first and a second strand, wherein the sequence of the first and/or second strand is the sequence of a first and/or second strand of: AD-39861.1 (SEQ ID NOs: 297 and 724), or modified or unmodified variants thereof, wherein the first and/or second strand further comprise up to about 20 additional nucleotides.

[2898] A RNAi agent comprising a first and a second strand, wherein the sequence of the first and/or second strand is the sequence of a first and/or second strand of: AD-39867.1 (SEQ ID NOs: 298 and 725), or modified or unmodified variants thereof, wherein the first and/or second strand further comprise up to about 20 additional nucleotides.

[2899] A RNAi agent comprising a first and a second strand, wherein the sequence of the first and/or second strand is the sequence of a first and/or second strand of: AD-39826.1 (SEQ ID NOs: 299 and 726), or modified or unmodified variants thereof, wherein the first and/or second strand further comprise up to about 20 additional nucleotides.

[2900] A RNAi agent comprising a first and a second strand, wherein the sequence of the first and/or second strand is the sequence of a first and/or second strand of: AD-39832.1 (SEQ ID NOs: 300 and 727), or modified or unmodified variants thereof, wherein the first and/or second strand further comprise up to about 20 additional nucleotides.

[2901] A RNAi agent comprising a first and a second strand, wherein the sequence of the first and/or second strand is the sequence of a first and/or second strand of: AD-39838.1 (SEQ ID NOs: 301 and 728), or modified or unmodified variants thereof, wherein the first and/or second strand further comprise up to about 20 additional nucleotides.

[2902] A RNAi agent comprising a first and a second strand, wherein the sequence of the first and/or second strand is the sequence of a first and/or second strand of: AD-39844.1 (SEQ ID NOs: 302 and 729), or modified or unmodified variants thereof, wherein the first and/or second strand further comprise up to about 20 additional nucleotides.

[2903] A RNAi agent comprising a first and a second strand, wherein the sequence of the first and/or second strand is the sequence of a first and/or second strand of: AD-39850.1 (SEQ ID NOs: 303 and 730), or modified or unmodified variants thereof, wherein the first and/or second strand further comprise up to about 20 additional nucleotides.

[2904] A RNAi agent comprising a first and a second strand, wherein the sequence of the first and/or second strand is the sequence of a first and/or second strand of: AD-39856.1 (SEQ ID NOs: 304 and 731), or modified or unmodified variants thereof, wherein the first and/or second strand further comprise A RNAi agent comprising a first and a second strand, wherein the sequence of the first and/or second strand is the sequence of a first and/or second strand of: AD-39862.1 (SEQ ID NOs: 305 and 732), or modified or unmodified variants thereof, wherein the first and/or second strand further comprise up to about 20 additional nucleotides.

[2905] A RNAi agent comprising a first and a second strand, wherein the sequence of the first and/or second strand is the sequence of a first and/or second strand of: AD-39868.1 (SEQ ID NOs: 306 and 733), or modified or unmodified variants thereof, wherein the first and/or second strand further comprise up to about 20 additional nucleotides.

[2906] A RNAi agent comprising a first and a second strand, wherein the sequence of the first and/or second strand is the sequence of a first and/or second strand of: AD-39827.1 (SEQ ID NOs: 307 and 734), or modified or unmodified variants thereof, wherein the first and/or second strand further comprise up to about 20 additional nucleotides.

[2907] A RNAi agent comprising a first and a second strand, wherein the sequence of the first and/or second strand is the sequence of a first and/or second strand of: AD-39833.1 (SEQ ID NOs: 308 and 735), or modified or unmodified variants thereof, wherein the first and/or second strand further comprise up to about 20 additional nucleotides.

[2908] A RNAi agent comprising a first and a second strand, wherein the sequence of the first and/or second strand is the sequence of a first and/or second strand of: AD-39839.1 (SEQ ID NOs: 309 and 736), or modified or unmodified variants thereof, wherein the first and/or second strand further comprise up to about 20 additional nucleotides.

[2909] A RNAi agent comprising a first and a second strand, wherein the sequence of the first and/or second strand is the sequence of a first and/or second strand of: AD-39845.1 (SEQ ID NOs: 310 and 737), or modified or unmodified variants thereof, wherein the first and/or second strand further comprise up to about 20 additional nucleotides.

[2910] A RNAi agent comprising a first and a second strand, wherein the sequence of the first and/or second strand is the sequence of a first and/or second strand of: AD-39851.1 (SEQ ID NOs: 311 and 738), or modified or unmodified variants thereof, wherein the first and/or second strand further comprise up to about 20 additional nucleotides.

[2911] A RNAi agent comprising a first and a second strand, wherein the sequence of the first and/or second strand is the sequence of a first and/or second strand of: AD-39857.1 (SEQ ID NOs: 312 and 739), or modified or unmodified variants thereof, wherein the first and/or second strand further comprise up to about 20 additional nucleotides.

[2912] A RNAi agent comprising a first and a second strand, wherein the sequence of the first and/or second strand is the sequence of a first and/or second strand of: AD-39863.1 (SEQ ID NOs: 313 and 740), or modified or unmodified variants thereof, wherein the first and/or second strand further comprise up to about 20 additional nucleotides.

[2913] A RNAi agent comprising a first and a second strand, wherein the sequence of the first and/or second strand is the sequence of a first and/or second strand of: AD-39869.1 (SEQ ID NOs: 314 and 741), or modified or unmodified variants thereof, wherein the first and/or second strand further comprise A RNAi agent comprising a first and a second strand, wherein the sequence of the first and/or second strand is the sequence of a first and/or second strand of: AD-39828.1 (SEQ ID NOs: 315 and 742), or modified or unmodified variants thereof, wherein the first and/or second strand further comprise up to about 20 additional nucleotides.

[2914] A RNAi agent comprising a first and a second strand, wherein the sequence of the first and/or second strand is the sequence of a first and/or second strand of: AD-39834.1 (SEQ ID NOs: 316 and 743), or modified or unmodified variants thereof, wherein the first and/or second strand further comprise up to about 20 additional nucleotides.

[2915] A RNAi agent comprising a first and a second strand, wherein the sequence of the first and/or second strand is the sequence of a first and/or second strand of: AD-39840.1 (SEQ ID NOs: 317 and 744), or modified or unmodified variants thereof, wherein the first and/or second strand further comprise up to about 20 additional nucleotides.

[2916] A RNAi agent comprising a first and a second strand, wherein the sequence of the first and/or second strand is the sequence of a first and/or second strand of: AD-39846.1 (SEQ ID NOs: 318 and 745), or modified or unmodified variants thereof, wherein the first and/or second strand further comprise up to about 20 additional nucleotides.

[2917] A RNAi agent comprising a first and a second strand, wherein the sequence of the first and/or second strand is the sequence of a first and/or second strand of: AD-39852.1 (SEQ ID NOs: 319 and 746), or modified or unmodified variants thereof, wherein the first and/or second strand further comprise up to about 20 additional nucleotides.

[2918] A RNAi agent comprising a first and a second strand, wherein the sequence of the first and/or second strand is the sequence of a first and/or second strand of: AD-39858.1 (SEQ ID NOs: 320 and 747), or modified or unmodified variants thereof, wherein the first and/or second strand further comprise up to about 20 additional nucleotides.

[2919] A RNAi agent comprising a first and a second strand, wherein the sequence of the first and/or second strand is the sequence of a first and/or second strand of: AD-39864.1 (SEQ ID NOs: 321 and 748), or modified or unmodified variants thereof, wherein the first and/or second strand further comprise up to about 20 additional nucleotides.

[2920] A RNAi agent comprising a first and a second strand, wherein the sequence of the first and/or second strand is the sequence of a first and/or second strand of: AD-39870.1 (SEQ ID NOs: 322 and 749), or modified or unmodified variants thereof, wherein the first and/or second strand further comprise up to about 20 additional nucleotides.

[2921] A RNAi agent comprising a first and a second strand, wherein the sequence of the first and/or second strand is the sequence of a first and/or second strand of: AD-39829.1 (SEQ ID NOs: 323 and 750), or modified or unmodified variants thereof, wherein the first and/or second strand further comprise up to about 20 additional nucleotides.

[2922] A RNAi agent comprising a first and a second strand, wherein the sequence of the first and/or second strand is the sequence of a first and/or second strand of: AD-39835.1 (SEQ ID NOs: 324 and 751), or modified or unmodified variants thereof, wherein the first and/or second strand further comprise A RNAi agent comprising a first and a second strand, wherein the sequence of the first and/or second strand is the sequence of a first and/or second strand of: AD-39841.1 (SEQ ID NOs: 325 and 752), or modified or unmodified variants thereof, wherein the first and/or second strand further comprise up to about 20 additional nucleotides.

[2923] A RNAi agent comprising a first and a second strand, wherein the sequence of the first and/or second strand is the sequence of a first and/or second strand of: AD-39853.1 (SEQ ID NOs: 326 and 753), or modified or unmodified variants thereof, wherein the first and/or second strand further comprise up to about 20 additional nucleotides.

[2924] A RNAi agent comprising a first and a second strand, wherein the sequence of the first and/or second strand is the sequence of a first and/or second strand of: AD-39859.1 (SEQ ID NOs: 327 and 754), or modified or unmodified variants thereof, wherein the first and/or second strand further comprise up to about 20 additional nucleotides.

[2925] A RNAi agent comprising a first and a second strand, wherein the sequence of the first and/or second strand is the sequence of a first and/or second strand of: AD-39865.1 (SEQ ID NOs: 328 and 755), or modified or unmodified variants thereof, wherein the first and/or second strand further comprise up to about 20 additional nucleotides.

[2926] A RNAi agent comprising a first and a second strand, wherein the sequence of the first and/or second strand is the sequence of a first and/or second strand of: AD-39871.1 (SEQ ID NOs: 329 and 756), or modified or unmodified variants thereof, wherein the first and/or second strand further comprise up to about 20 additional nucleotides.

[2927] A RNAi agent comprising a first and a second strand, wherein the sequence of the first and/or second strand is the sequence of a first and/or second strand of: AD-39830.1 (SEQ ID NOs: 330 and 757), or modified or unmodified variants thereof, wherein the first and/or second strand further comprise up to about 20 additional nucleotides.

[2928] A RNAi agent comprising a first and a second strand, wherein the sequence of the first and/or second strand is the sequence of a first and/or second strand of: AD-39836.1 (SEQ ID NOs: 331 and 758), or modified or unmodified variants thereof, wherein the first and/or second strand further comprise up to about 20 additional nucleotides.

[2929] A RNAi agent comprising a first and a second strand, wherein the sequence of the first and/or second strand is the sequence of a first and/or second strand of: AD-39842.1 (SEQ ID NOs: 332 and 759), or modified or unmodified variants thereof, wherein the first and/or second strand further comprise up to about 20 additional nucleotides.

[2930] A RNAi agent comprising a first and a second strand, wherein the sequence of the first and/or second strand is the sequence of a first and/or second strand of: AD-39848.1 (SEQ ID NOs: 333 and 760), or modified or unmodified variants thereof, wherein the first and/or second strand further comprise up to about 20 additional nucleotides.

[2931] A RNAi agent comprising a first and a second strand, wherein the sequence of the first and/or second strand is the sequence of a first and/or second strand of: AD-39854.1 (SEQ ID NOs: 334 and 761), or modified or unmodified variants thereof, wherein the first and/or second strand further comprise A RNAi agent comprising a first and a second strand, wherein the sequence of the first and/or second strand is the sequence of a first and/or second strand of: AD-39860.1 (SEQ ID NOs: 335 and 762), or modified or unmodified variants thereof, wherein the first and/or second strand further comprise up to about 20 additional nucleotides.

[2932] A RNAi agent comprising a first and a second strand, wherein the sequence of the first and/or second strand is the sequence of a first and/or second strand of: AD-39866.1 (SEQ ID NOs: 336 and 763), or modified or unmodified variants thereof, wherein the first and/or second strand further comprise up to about 20 additional nucleotides.

[2933] A RNAi agent comprising a first and a second strand, wherein the sequence of the first and/or second strand is the sequence of a first and/or second strand of: AD-39992.1 (SEQ ID NOs: 337 and 764), or modified or unmodified variants thereof, wherein the first and/or second strand further comprise up to about 20 additional nucleotides.

[2934] A RNAi agent comprising a first and a second strand, wherein the sequence of the first and/or second strand is the sequence of a first and/or second strand of: AD-39998.1 (SEQ ID NOs: 338 and 765), or modified or unmodified variants thereof, wherein the first and/or second strand further comprise up to about 20 additional nucleotides.

[2935] A RNAi agent comprising a first and a second strand, wherein the sequence of the first and/or second strand is the sequence of a first and/or second strand of: AD-40004.1 (SEQ ID NOs: 339 and 766), or modified or unmodified variants thereof, wherein the first and/or second strand further comprise up to about 20 additional nucleotides.

[2936] A RNAi agent comprising a first and a second strand, wherein the sequence of the first and/or second strand is the sequence of a first and/or second strand of: AD-40010.1 (SEQ ID NOs: 340 and 767), or modified or unmodified variants thereof, wherein the first and/or second strand further comprise up to about 20 additional nucleotides.

[2937] A RNAi agent comprising a first and a second strand, wherein the sequence of the first and/or second strand is the sequence of a first and/or second strand of: AD-40016.1 (SEQ ID NOs: 341 and 768), or modified or unmodified variants thereof, wherein the first and/or second strand further comprise up to about 20 additional nucleotides.

[2938] A RNAi agent comprising a first and a second strand, wherein the sequence of the first and/or second strand is the sequence of a first and/or second strand of: AD-40022.1 (SEQ ID NOs: 342 and 769), or modified or unmodified variants thereof, wherein the first and/or second strand further comprise up to about 20 additional nucleotides.

[2939] A RNAi agent comprising a first and a second strand, wherein the sequence of the first and/or second strand is the sequence of a first and/or second strand of: AD-40028.1 (SEQ ID NOs: 343 and 770), or modified or unmodified variants thereof, wherein the first and/or second strand further comprise up to about 20 additional nucleotides.

[2940] A RNAi agent comprising a first and a second strand, wherein the sequence of the first and/or second strand is the sequence of a first and/or second strand of: AD-40034.1 (SEQ ID NOs: 344 and 771), or modified or unmodified variants thereof, wherein the first and/or second strand further comprise A RNAi agent comprising a first and a second strand, wherein the sequence of the first and/or second strand is the sequence of a first and/or second strand of: AD-39999.1 (SEQ ID NOs: 345 and 772), or modified or unmodified variants thereof, wherein the first and/or second strand further comprise up to about 20 additional nucleotides.

[2941] A RNAi agent comprising a first and a second strand, wherein the sequence of the first and/or second strand is the sequence of a first and/or second strand of: AD-40005.1 (SEQ ID NOs: 346 and 773), or modified or unmodified variants thereof, wherein the first and/or second strand further comprise up to about 20 additional nucleotides.

[2942] A RNAi agent comprising a first and a second strand, wherein the sequence of the first and/or second strand is the sequence of a first and/or second strand of: AD-40011.1 (SEQ ID NOs: 347 and 774), or modified or unmodified variants thereof, wherein the first and/or second strand further comprise up to about 20 additional nucleotides.

[2943] A RNAi agent comprising a first and a second strand, wherein the sequence of the first and/or second strand is the sequence of a first and/or second strand of: AD-40017.1 (SEQ ID NOs: 348 and 775), or modified or unmodified variants thereof, wherein the first and/or second strand further comprise up to about 20 additional nucleotides.

[2944] A RNAi agent comprising a first and a second strand, wherein the sequence of the first and/or second strand is the sequence of a first and/or second strand of: AD-40029.1 (SEQ ID NOs: 349 and 776), or modified or unmodified variants thereof, wherein the first and/or second strand further comprise up to about 20 additional nucleotides.

[2945] A RNAi agent comprising a first and a second strand, wherein the sequence of the first and/or second strand is the sequence of a first and/or second strand of: AD-40035.1 (SEQ ID NOs: 350 and 777), or modified or unmodified variants thereof, wherein the first and/or second strand further comprise up to about 20 additional nucleotides.

[2946] A RNAi agent comprising a first and a second strand, wherein the sequence of the first and/or second strand is the sequence of a first and/or second strand of: AD-39994.1 (SEQ ID NOs: 351 and 778), or modified or unmodified variants thereof, wherein the first and/or second strand further comprise up to about 20 additional nucleotides.

[2947] A RNAi agent comprising a first and a second strand, wherein the sequence of the first and/or second strand is the sequence of a first and/or second strand of: AD-40000.1 (SEQ ID NOs: 352 and 779), or modified or unmodified variants thereof, wherein the first and/or second strand further comprise up to about 20 additional nucleotides.

[2948] A RNAi agent comprising a first and a second strand, wherein the sequence of the first and/or second strand is the sequence of a first and/or second strand of: AD-40006.1 (SEQ ID NOs: 353 and 780), or modified or unmodified variants thereof, wherein the first and/or second strand further comprise up to about 20 additional nucleotides.

[2949] A RNAi agent comprising a first and a second strand, wherein the sequence of the first and/or second strand is the sequence of a first and/or second strand of: AD-40012.1 (SEQ ID NOs: 354 and 781), or modified or unmodified variants thereof, wherein the first and/or second strand further comprise A RNAi agent comprising a first and a second strand, wherein the sequence of the first and/or second strand is the sequence of a first and/or second strand of: AD-40018.1 (SEQ ID NOs: 355 and 782), or modified or unmodified variants thereof, wherein the first and/or second strand further comprise up to about 20 additional nucleotides.

[2950] A RNAi agent comprising a first and a second strand, wherein the sequence of the first and/or second strand is the sequence of a first and/or second strand of: AD-40024.1 (SEQ ID NOs: 356 and 783), or modified or unmodified variants thereof, wherein the first and/or second strand further comprise up to about 20 additional nucleotides.

[2951] A RNAi agent comprising a first and a second strand, wherein the sequence of the first and/or second strand is the sequence of a first and/or second strand of: AD-40030.1 (SEQ ID NOs: 357 and 784), or modified or unmodified variants thereof, wherein the first and/or second strand further comprise up to about 20 additional nucleotides.

[2952] A RNAi agent comprising a first and a second strand, wherein the sequence of the first and/or second strand is the sequence of a first and/or second strand of: AD-40036.1 (SEQ ID NOs: 358 and 785), or modified or unmodified variants thereof, wherein the first and/or second strand further comprise up to about 20 additional nucleotides.

[2953] A RNAi agent comprising a first and a second strand, wherein the sequence of the first and/or second strand is the sequence of a first and/or second strand of: AD-39995.1 (SEQ ID NOs: 359 and 786), or modified or unmodified variants thereof, wherein the first and/or second strand further comprise up to about 20 additional nucleotides.

[2954] A RNAi agent comprising a first and a second strand, wherein the sequence of the first and/or second strand is the sequence of a first and/or second strand of: AD-40001.1 (SEQ ID NOs: 360 and 787), or modified or unmodified variants thereof, wherein the first and/or second strand further comprise up to about 20 additional nucleotides.

[2955] A RNAi agent comprising a first and a second strand, wherein the sequence of the first and/or second strand is the sequence of a first and/or second strand of: AD-40007.1 (SEQ ID NOs: 361 and 788), or modified or unmodified variants thereof, wherein the first and/or second strand further comprise up to about 20 additional nucleotides.

[2956] A RNAi agent comprising a first and a second strand, wherein the sequence of the first and/or second strand is the sequence of a first and/or second strand of: AD-40013.1 (SEQ ID NOs: 362 and 789), or modified or unmodified variants thereof, wherein the first and/or second strand further comprise up to about 20 additional nucleotides.

[2957] A RNAi agent comprising a first and a second strand, wherein the sequence of the first and/or second strand is the sequence of a first and/or second strand of: AD-40019.1 (SEQ ID NOs: 363 and 790), or modified or unmodified variants thereof, wherein the first and/or second strand further comprise up to about 20 additional nucleotides.

[2958] A RNAi agent comprising a first and a second strand, wherein the sequence of the first and/or second strand is the sequence of a first and/or second strand of: AD-40025.1 (SEQ ID NOs: 364 and 791), or modified or unmodified variants thereof, wherein the first and/or second strand further comprise A RNAi agent comprising a first and a second strand, wherein the sequence of the first and/or second strand is the sequence of a first and/or second strand of: AD-40031.1 (SEQ ID NOs: 365 and 792), or modified or unmodified variants thereof, wherein the first and/or second strand further comprise up to about 20 additional nucleotides.

[2959] A RNAi agent comprising a first and a second strand, wherein the sequence of the first and/or second strand is the sequence of a first and/or second strand of: AD-40037.1 (SEQ ID NOs: 366 and 793), or modified or unmodified variants thereof, wherein the first and/or second strand further comprise up to about 20 additional nucleotides.

[2960] A RNAi agent comprising a first and a second strand, wherein the sequence of the first and/or second strand is the sequence of a first and/or second strand of: AD-39996.1 (SEQ ID NOs: 367 and 794), or modified or unmodified variants thereof, wherein the first and/or second strand further comprise up to about 20 additional nucleotides.

[2961] A RNAi agent comprising a first and a second strand, wherein the sequence of the first and/or second strand is the sequence of a first and/or second strand of: AD-40002.1 (SEQ ID NOs: 368 and 795), or modified or unmodified variants thereof, wherein the first and/or second strand further comprise up to about 20 additional nucleotides.

[2962] A RNAi agent comprising a first and a second strand, wherein the sequence of the first and/or second strand is the sequence of a first and/or second strand of: AD-40008.1 (SEQ ID NOs: 369 and 796), or modified or unmodified variants thereof, wherein the first and/or second strand further comprise up to about 20 additional nucleotides.

[2963] A RNAi agent comprising a first and a second strand, wherein the sequence of the first and/or second strand is the sequence of a first and/or second strand of: AD-40014.1 (SEQ ID NOs: 370 and 797), or modified or unmodified variants thereof, wherein the first and/or second strand further comprise up to about 20 additional nucleotides.

[2964] A RNAi agent comprising a first and a second strand, wherein the sequence of the first and/or second strand is the sequence of a first and/or second strand of: AD-40020.1 (SEQ ID NOs: 371 and 798), or modified or unmodified variants thereof, wherein the first and/or second strand further comprise up to about 20 additional nucleotides.

[2965] A RNAi agent comprising a first and a second strand, wherein the sequence of the first and/or second strand is the sequence of a first and/or second strand of: AD-40026.1 (SEQ ID NOs: 372 and 799), or modified or unmodified variants thereof, wherein the first and/or second strand further comprise up to about 20 additional nucleotides.

[2966] A RNAi agent comprising a first and a second strand, wherein the sequence of the first and/or second strand is the sequence of a first and/or second strand of: AD-40032.1 (SEQ ID NOs: 373 and 800), or modified or unmodified variants thereof, wherein the first and/or second strand further comprise up to about 20 additional nucleotides.

[2967] A RNAi agent comprising a first and a second strand, wherein the sequence of the first and/or second strand is the sequence of a first and/or second strand of: AD-40038.1 (SEQ ID NOs: 374 and 801), or modified or unmodified variants thereof, wherein the first and/or second strand further comprise A RNAi agent comprising a first and a second strand, wherein the sequence of the first and/or second strand is the sequence of a first and/or second strand of: AD-39997.1 (SEQ ID NOs: 375 and 802), or modified or unmodified variants thereof, wherein the first and/or second strand further comprise up to about 20 additional nucleotides.

[2968] A RNAi agent comprising a first and a second strand, wherein the sequence of the first and/or second strand is the sequence of a first and/or second strand of: AD-40009.1 (SEQ ID NOs: 376 and 803), or modified or unmodified variants thereof, wherein the first and/or second strand further comprise up to about 20 additional nucleotides.

[2969] A RNAi agent comprising a first and a second strand, wherein the sequence of the first and/or second strand is the sequence of a first and/or second strand of: AD-40015.1 (SEQ ID NOs: 377 and 804), or modified or unmodified variants thereof, wherein the first and/or second strand further comprise up to about 20 additional nucleotides.

[2970] A RNAi agent comprising a first and a second strand, wherein the sequence of the first and/or second strand is the sequence of a first and/or second strand of: AD-40021.1 (SEQ ID NOs: 378 and 805), or modified or unmodified variants thereof, wherein the first and/or second strand further comprise up to about 20 additional nucleotides.

[2971] A RNAi agent comprising a first and a second strand, wherein the sequence of the first and/or second strand is the sequence of a first and/or second strand of: AD-40027.1 (SEQ ID NOs: 379 and 806), or modified or unmodified variants thereof, wherein the first and/or second strand further comprise up to about 20 additional nucleotides.

[2972] A RNAi agent comprising a first and a second strand, wherein the sequence of the first and/or second strand is the sequence of a first and/or second strand of: AD-40033.1 (SEQ ID NOs: 380 and 807), or modified or unmodified variants thereof, wherein the first and/or second strand further comprise up to about 20 additional nucleotides.

[2973] A RNAi agent comprising a first and a second strand, wherein the sequence of the first and/or second strand is the sequence of a first and/or second strand of: AD-40039.1 (SEQ ID NOs: 381 and 808), or modified or unmodified variants thereof, wherein the first and/or second strand further comprise up to about 20 additional nucleotides.

[2974] A RNAi agent comprising a first and a second strand, wherein the sequence of the first and/or second strand is the sequence of a first and/or second strand of: AD-40045.1 (SEQ ID NOs: 382 and 809), or modified or unmodified variants thereof, wherein the first and/or second strand further comprise up to about 20 additional nucleotides.

[2975] A RNAi agent comprising a first and a second strand, wherein the sequence of the first and/or second strand is the sequence of a first and/or second strand of: AD-40051.1 (SEQ ID NOs: 383 and 810), or modified or unmodified variants thereof, wherein the first and/or second strand further comprise up to about 20 additional nucleotides.

[2976] A RNAi agent comprising a first and a second strand, wherein the sequence of the first and/or second strand is the sequence of a first and/or second strand of: AD-40057.1 (SEQ ID NOs: 384 and 811), or modified or unmodified variants thereof, wherein the first and/or second strand further comprise A RNAi agent comprising a first and a second strand, wherein the sequence of the first and/or second strand is the sequence of a first and/or second strand of: AD-40063.1 (SEQ ID NOs: 385 and 812), or modified or unmodified variants thereof, wherein the first and/or second strand further comprise up to about 20 additional nucleotides.

[2977] A RNAi agent comprising a first and a second strand, wherein the sequence of the first and/or second strand is the sequence of a first and/or second strand of: AD-40069.1 (SEQ ID NOs: 386 and 813), or modified or unmodified variants thereof, wherein the first and/or second strand further comprise up to about 20 additional nucleotides.

[2978] A RNAi agent comprising a first and a second strand, wherein the sequence of the first and/or second strand is the sequence of a first and/or second strand of: AD-40075.1 (SEQ ID NOs: 387 and 814), or modified or unmodified variants thereof, wherein the first and/or second strand further comprise up to about 20 additional nucleotides.

[2979] A RNAi agent comprising a first and a second strand, wherein the sequence of the first and/or second strand is the sequence of a first and/or second strand of: AD-40081.1 (SEQ ID NOs: 388 and 815), or modified or unmodified variants thereof, wherein the first and/or second strand further comprise up to about 20 additional nucleotides.

[2980] A RNAi agent comprising a first and a second strand, wherein the sequence of the first and/or second strand is the sequence of a first and/or second strand of: AD-40040.1 (SEQ ID NOs: 389 and 816), or modified or unmodified variants thereof, wherein the first and/or second strand further comprise up to about 20 additional nucleotides.

[2981] A RNAi agent comprising a first and a second strand, wherein the sequence of the first and/or second strand is the sequence of a first and/or second strand of: AD-40046.1 (SEQ ID NOs: 390 and 817), or modified or unmodified variants thereof, wherein the first and/or second strand further comprise up to about 20 additional nucleotides.

[2982] A RNAi agent comprising a first and a second strand, wherein the sequence of the first and/or second strand is the sequence of a first and/or second strand of: AD-40052.1 (SEQ ID NOs: 391 and 818), or modified or unmodified variants thereof, wherein the first and/or second strand further comprise up to about 20 additional nucleotides.

[2983] A RNAi agent comprising a first and a second strand, wherein the sequence of the first and/or second strand is the sequence of a first and/or second strand of: AD-40058.1 (SEQ ID NOs: 392 and 819), or modified or unmodified variants thereof, wherein the first and/or second strand further comprise up to about 20 additional nucleotides.

[2984] A RNAi agent comprising a first and a second strand, wherein the sequence of the first and/or second strand is the sequence of a first and/or second strand of: AD-40064.1 (SEQ ID NOs: 393 and 820), or modified or unmodified variants thereof, wherein the first and/or second strand further comprise up to about 20 additional nucleotides.

[2985] A RNAi agent comprising a first and a second strand, wherein the sequence of the first and/or second strand is the sequence of a first and/or second strand of: AD-40070.1 (SEQ ID NOs: 394 and 821), or modified or unmodified variants thereof, wherein the first and/or second strand further comprise A RNAi agent comprising a first and a second strand, wherein the sequence of the first and/or second strand is the sequence of a first and/or second strand of: AD-40076.1 (SEQ ID NOs: 395 and 822), or modified or unmodified variants thereof, wherein the first and/or second strand further comprise up to about 20 additional nucleotides.

[2986] A RNAi agent comprising a first and a second strand, wherein the sequence of the first and/or second strand is the sequence of a first and/or second strand of: AD-40082.1 (SEQ ID NOs: 396 and 823), or modified or unmodified variants thereof, wherein the first and/or second strand further comprise up to about 20 additional nucleotides.

[2987] A RNAi agent comprising a first and a second strand, wherein the sequence of the first and/or second strand is the sequence of a first and/or second strand of: AD-40041.1 (SEQ ID NOs: 397 and 824), or modified or unmodified variants thereof, wherein the first and/or second strand further comprise up to about 20 additional nucleotides.

[2988] A RNAi agent comprising a first and a second strand, wherein the sequence of the first and/or second strand is the sequence of a first and/or second strand of: AD-40047.1 (SEQ ID NOs: 398 and 825), or modified or unmodified variants thereof, wherein the first and/or second strand further comprise up to about 20 additional nucleotides.

[2989] A RNAi agent comprising a first and a second strand, wherein the sequence of the first and/or second strand is the sequence of a first and/or second strand of: AD-40053.1 (SEQ ID NOs: 399 and 826), or modified or unmodified variants thereof, wherein the first and/or second strand further comprise up to about 20 additional nucleotides.

[2990] A RNAi agent comprising a first and a second strand, wherein the sequence of the first and/or second strand is the sequence of a first and/or second strand of: AD-40059.1 (SEQ ID NOs: 400 and 827), or modified or unmodified variants thereof, wherein the first and/or second strand further comprise up to about 20 additional nucleotides.

[2991] A RNAi agent comprising a first and a second strand, wherein the sequence of the first and/or second strand is the sequence of a first and/or second strand of: AD-40065.1 (SEQ ID NOs: 401 and 828), or modified or unmodified variants thereof, wherein the first and/or second strand further comprise up to about 20 additional nucleotides.

[2992] A RNAi agent comprising a first and a second strand, wherein the sequence of the first and/or second strand is the sequence of a first and/or second strand of: AD-40071.1 (SEQ ID NOs: 402 and 829), or modified or unmodified variants thereof, wherein the first and/or second strand further comprise up to about 20 additional nucleotides.

[2993] A RNAi agent comprising a first and a second strand, wherein the sequence of the first and/or second strand is the sequence of a first and/or second strand of: AD-40077.1 (SEQ ID NOs: 403 and 830), or modified or unmodified variants thereof, wherein the first and/or second strand further comprise up to about 20 additional nucleotides.

[2994] A RNAi agent comprising a first and a second strand, wherein the sequence of the first and/or second strand is the sequence of a first and/or second strand of: AD-40083.1 (SEQ ID NOs: 404 and 831), or modified or unmodified variants thereof, wherein the first and/or second strand further comprise A RNAi agent comprising a first and a second strand, wherein the sequence of the first and/or second strand is the sequence of a first and/or second strand of: AD-40042.1 (SEQ ID NOs: 405 and 832), or modified or unmodified variants thereof, wherein the first and/or second strand further comprise up to about 20 additional nucleotides.

[2995] A RNAi agent comprising a first and a second strand, wherein the sequence of the first and/or second strand is the sequence of a first and/or second strand of: AD-40048.1 (SEQ ID NOs: 406 and 833), or modified or unmodified variants thereof, wherein the first and/or second strand further comprise up to about 20 additional nucleotides.

[2996] A RNAi agent comprising a first and a second strand, wherein the sequence of the first and/or second strand is the sequence of a first and/or second strand of: AD-40054.1 (SEQ ID NOs: 407 and 834), or modified or unmodified variants thereof, wherein the first and/or second strand further comprise up to about 20 additional nucleotides.

[2997] A RNAi agent comprising a first and a second strand, wherein the sequence of the first and/or second strand is the sequence of a first and/or second strand of: AD-40060.1 (SEQ ID NOs: 408 and 835), or modified or unmodified variants thereof, wherein the first and/or second strand further comprise up to about 20 additional nucleotides.

[2998] A RNAi agent comprising a first and a second strand, wherein the sequence of the first and/or second strand is the sequence of a first and/or second strand of: AD-40066.1 (SEQ ID NOs: 409 and 836), or modified or unmodified variants thereof, wherein the first and/or second strand further comprise up to about 20 additional nucleotides.

[2999] A RNAi agent comprising a first and a second strand, wherein the sequence of the first and/or second strand is the sequence of a first and/or second strand of: AD-40072.1 (SEQ ID NOs: 410 and 837), or modified or unmodified variants thereof, wherein the first and/or second strand further comprise up to about 20 additional nucleotides.

[3000] A RNAi agent comprising a first and a second strand, wherein the sequence of the first and/or second strand is the sequence of a first and/or second strand of: AD-40078.1 (SEQ ID NOs: 411 and 838), or modified or unmodified variants thereof, wherein the first and/or second strand further comprise up to about 20 additional nucleotides.

[3001] A RNAi agent comprising a first and a second strand, wherein the sequence of the first and/or second strand is the sequence of a first and/or second strand of: AD-40084.1 (SEQ ID NOs: 412 and 839), or modified or unmodified variants thereof, wherein the first and/or second strand further comprise up to about 20 additional nucleotides.

[3002] A RNAi agent comprising a first and a second strand, wherein the sequence of the first and/or second strand is the sequence of a first and/or second strand of: AD-40043.1 (SEQ ID NOs: 413 and 840), or modified or unmodified variants thereof, wherein the first and/or second strand further comprise up to about 20 additional nucleotides.

[3003] A RNAi agent comprising a first and a second strand, wherein the sequence of the first and/or second strand is the sequence of a first and/or second strand of: AD-40049.1 (SEQ ID NOs: 414 and 841), or modified or unmodified variants thereof, wherein the first and/or second strand further comprise A RNAi agent comprising a first and a second strand, wherein the sequence of the first and/or second strand is the sequence of a first and/or second strand of: AD-40055.1 (SEQ ID NOs: 415 and 842), or modified or unmodified variants thereof, wherein the first and/or second strand further comprise up to about 20 additional nucleotides.

[3004] A RNAi agent comprising a first and a second strand, wherein the sequence of the first and/or second strand is the sequence of a first and/or second strand of: AD-40061.1 (SEQ ID NOs: 416 and 843), or modified or unmodified variants thereof, wherein the first and/or second strand further comprise up to about 20 additional nucleotides.

[3005] A RNAi agent comprising a first and a second strand, wherein the sequence of the first and/or second strand is the sequence of a first and/or second strand of: AD-40067.1 (SEQ ID NOs: 417 and 844), or modified or unmodified variants thereof, wherein the first and/or second strand further comprise up to about 20 additional nucleotides.

[3006] A RNAi agent comprising a first and a second strand, wherein the sequence of the first and/or second strand is the sequence of a first and/or second strand of: AD-40073.1 (SEQ ID NOs: 418 and 845), or modified or unmodified variants thereof, wherein the first and/or second strand further comprise up to about 20 additional nucleotides.

[3007] A RNAi agent comprising a first and a second strand, wherein the sequence of the first and/or second strand is the sequence of a first and/or second strand of: AD-40079.1 (SEQ ID NOs: 419 and 846), or modified or unmodified variants thereof, wherein the first and/or second strand further comprise up to about 20 additional nucleotides.

[3008] A RNAi agent comprising a first and a second strand, wherein the sequence of the first and/or second strand is the sequence of a first and/or second strand of: AD-40085.1 (SEQ ID NOs: 420 and 847), or modified or unmodified variants thereof, wherein the first and/or second strand further comprise up to about 20 additional nucleotides.

[3009] A RNAi agent comprising a first and a second strand, wherein the sequence of the first and/or second strand is the sequence of a first and/or second strand of: AD-40044.1 (SEQ ID NOs: 421 and 848), or modified or unmodified variants thereof, wherein the first and/or second strand further comprise up to about 20 additional nucleotides.

[3010] A RNAi agent comprising a first and a second strand, wherein the sequence of the first and/or second strand is the sequence of a first and/or second strand of: AD-40050.1 (SEQ ID NOs: 422 and 849), or modified or unmodified variants thereof, wherein the first and/or second strand further comprise up to about 20 additional nucleotides.

[3011] A RNAi agent comprising a first and a second strand, wherein the sequence of the first and/or second strand is the sequence of a first and/or second strand of: AD-40056.1 (SEQ ID NOs: 423 and 850), or modified or unmodified variants thereof, wherein the first and/or second strand further comprise up to about 20 additional nucleotides.

[3012] A RNAi agent comprising a first and a second strand, wherein the sequence of the first and/or second strand is the sequence of a first and/or second strand of: AD-40062.1 (SEQ ID NOs: 424 and 851), or modified or unmodified variants thereof, wherein the first and/or second strand further comprise A RNAi agent comprising a first and a second strand, wherein the sequence of the first and/or second strand is the sequence of a first and/or second strand of: AD-40068.1 (SEQ ID NOs: 425 and 852), or modified or unmodified variants thereof, wherein the first and/or second strand further comprise up to about 20 additional nucleotides.

[3013] A RNAi agent comprising a first and a second strand, wherein the sequence of the first and/or second strand is the sequence of a first and/or second strand of: AD-40074.1 (SEQ ID NOs: 426 and 853), or modified or unmodified variants thereof, wherein the first and/or second strand further comprise up to about 20 additional nucleotides.

[3014] A RNAi agent comprising a first and a second strand, wherein the sequence of the first and/or second strand is the sequence of a first and/or second strand of: AD-40080.1 (SEQ ID NOs: 427 and 854), or modified or unmodified variants thereof, wherein the first and/or second strand further comprise up to about 20 additional nucleotides.

[3015] A RNAi agent comprising a first and a second strand, wherein the sequence of the first and/or second strand is the sequence of a first and/or second strand of: AD-39720.1 (SEQ ID NOs: 1716 and 1754), or modified or unmodified variants thereof, wherein the first and/or second strand further comprise up to about 20 additional nucleotides.

[3016] A RNAi agent comprising a first and a second strand, wherein the sequence of the first and/or second strand is the sequence of a first and/or second strand of: AD-39706.1 (SEQ ID NOs: 1717 and 1755), or modified or unmodified variants thereof, wherein the first and/or second strand further comprise up to about 20 additional nucleotides.

[3017] A RNAi agent comprising a first and a second strand, wherein the sequence of the first and/or second strand is the sequence of a first and/or second strand of: AD-39712.1 (SEQ ID NOs: 1718 and 1756), or modified or unmodified variants thereof, wherein the first and/or second strand further comprise up to about 20 additional nucleotides.

[3018] A RNAi agent comprising a first and a second strand, wherein the sequence of the first and/or second strand is the sequence of a first and/or second strand of: AD-39760.1 (SEQ ID NOs: 1719 and 1757), or modified or unmodified variants thereof, wherein the first and/or second strand further comprise up to about 20 additional nucleotides.

[3019] A RNAi agent comprising a first and a second strand, wherein the sequence of the first and/or second strand is the sequence of a first and/or second strand of: AD-39732.1 (SEQ ID NOs: 1720 and 1758), or modified or unmodified variants thereof, wherein the first and/or second strand further comprise up to about 20 additional nucleotides.

[3020] A RNAi agent comprising a first and a second strand, wherein the sequence of the first and/or second strand is the sequence of a first and/or second strand of: AD-35541.4 (SEQ ID NOs: 1721 and 1759), or modified or unmodified variants thereof, wherein the first and/or second strand further comprise up to about 20 additional nucleotides.

[3021] A RNAi agent comprising a first and a second strand, wherein the sequence of the first and/or second strand is the sequence of a first and/or second strand of: AD-39735.1 or hs_KRAS_321_A22S26 (SEQ ID NOs: 1722 and 1760), or modified or unmodified variants thereof, wherein the first and/or second strand further comprise up to about 20 additional nucleotides. A RNAi agent comprising a first and a second strand, wherein the sequence of the first and/or second strand is the sequence of a first and/or second strand of: AD-39741.1, or modified or unmodified variants thereof, wherein the first and/or second strand further comprise up to about 20 additional nucleotides.

[3022] A RNAi agent comprising a first and a second strand, wherein the sequence of the first and/or second strand is the sequence of a first and/or second strand of: hs_KRAS_322_A22S26 (SEQ ID NOs: 1723 and 1761), or modified or unmodified variants thereof, wherein the first and/or second strand further comprise up to about 20 additional nucleotides.

[3023] A RNAi agent comprising a first and a second strand, wherein the sequence of the first and/or 10 second strand is the sequence of a first and/or second strand of: AD-39778.1 (SEQ ID NOs: 1724 and 1762), or modified or unmodified variants thereof, wherein the first and/or second strand further comprise up to about 20 additional nucleotides.

[3024] A RNAi agent comprising a first and a second strand, wherein the sequence of the first and/or second strand is the sequence of a first and/or second strand of: AD-39790.1 (SEQ ID NOs: 1725 and 1763), or modified or unmodified variants thereof, wherein the first and/or second strand further comprise up to about 20 additional nucleotides.

[3025] A RNAi agent comprising a first and a second strand, wherein the sequence of the first and/or second strand is the sequence of a first and/or second strand of: AD-39822.1 (SEQ ID NOs: 1726 and 1764), or modified or unmodified variants thereof, wherein the first and/or second strand further comprise up to about 20 additional nucleotides.

[3026] A RNAi agent comprising a first and a second strand, wherein the sequence of the first and/or second strand is the sequence of a first and/or second strand of: AD-35609.4 (SEQ ID NOs: 1727 and 1765), or modified or unmodified variants thereof, wherein the first and/or second strand further comprise up to about 20 additional nucleotides.

[3027] A RNAi agent comprising a first and a second strand, wherein the sequence of the first and/or second strand is the sequence of a first and/or second strand of: AD-35581.4 (SEQ ID NOs: 1728 and 1766), or modified or unmodified variants thereof, wherein the first and/or second strand further comprise up to about 20 additional nucleotides.

[3028] A RNAi agent comprising a first and a second strand, wherein the sequence of the first and/or 30 second strand is the sequence of a first and/or second strand of: AD-39845.1 (SEQ ID NOs: 1729 and 1767), or modified or unmodified variants thereof, wherein the first and/or second strand further comprise up to about 20 additional nucleotides.

[3029] A RNAi agent comprising a first and a second strand, wherein the sequence of the first and/or second strand is the sequence of a first and/or second strand of: AD-39858.1 (SEQ ID NOs: 1730 and 1768), or modified or unmodified variants thereof, wherein the first and/or second strand further comprise up to about 20 additional nucleotides.

[3030] A RNAi agent comprising a first and a second strand, wherein the sequence of the first and/or second strand is the sequence of a first and/or second strand of: AD-39870.1 (SEQ ID NOs: 1731 and 1769), or modified or unmodified variants thereof, wherein the first and/or second strand further comprise up to about 20 additional nucleotides. A RNAi agent comprising a first and a second strand, wherein the sequence of the first and/or second strand is the sequence of a first and/or second strand of: AD-35576.4 (SEQ ID NOs: 1732 and 1770), or modified or unmodified variants thereof, wherein the first and/or second strand further comprise up to about 20 additional nucleotides.

[3031] A RNAi agent comprising a first and a second strand, wherein the sequence of the first and/or second strand is the sequence of a first and/or second strand of: AD-35588.4 (SEQ ID NOs: 1733 and 1771), or modified or unmodified variants thereof, wherein the first and/or second strand further comprise up to about 20 additional nucleotides.

[3032] A RNAi agent comprising a first and a second strand, wherein the sequence of the first and/or 10 second strand is the sequence of a first and/or second strand of: AD-35600.1 (SEQ ID NOs: 1734 and 1772), or modified or unmodified variants thereof, wherein the first and/or second strand further comprise up to about 20 additional nucleotides.

[3033] A RNAi agent comprising a first and a second strand, wherein the sequence of the first and/or second strand is the sequence of a first and/or second strand of: AD-35606.1 (SEQ ID NOs: 1735 and 1773), or modified or unmodified variants thereof, wherein the first and/or second strand further comprise up to about 20 additional nucleotides.

[3034] A RNAi agent comprising a first and a second strand, wherein the sequence of the first and/or second strand is the sequence of a first and/or second strand of: AD-38151.1 (SEQ ID NOs: 1736 and 1774), or modified or unmodified variants thereof, wherein the first and/or second strand further comprise up to about 20 additional nucleotides.

[3035] A RNAi agent comprising a first and a second strand, wherein the sequence of the first and/or second strand is the sequence of a first and/or second strand of: AD-38163.1 (SEQ ID NOs: 1737 and 1775), or modified or unmodified variants thereof, wherein the first and/or second strand further comprise up to about 20 additional nucleotides.

[3036] A RNAi agent comprising a first and a second strand, wherein the sequence of the first and/or second strand is the sequence of a first and/or second strand of: AD-39999.1 (SEQ ID NOs: 1738 and 1776), or modified or unmodified variants thereof, wherein the first and/or second strand further comprise up to about 20 additional nucleotides.

[3037] A RNAi agent comprising a first and a second strand, wherein the sequence of the first and/or 30 second strand is the sequence of a first and/or second strand of: AD-38159.1 or hs_KRAS_528_A22S26 (SEQ ID NOs: 1739 and 1777), or modified or unmodified variants thereof, wherein the first and/or second strand further comprise up to about 20 additional nucleotides.

[3038] A RNAi agent comprising a first and a second strand, wherein the sequence of the first and/or second strand is the sequence of a first and/or second strand of: AD-38130.1 or hs_KRAS_531_A22S26 (SEQ ID NOs: 1740 and 1778), or modified or unmodified variants thereof, wherein the first and/or second strand further comprise up to about 20 additional nucleotides.

[3039] A RNAi agent comprising a first and a second strand, wherein the sequence of the first and/or second strand is the sequence of a first and/or second strand of: AD-38136.1 (SEQ ID NOs: 1741 and 1779), or modified or unmodified variants thereof, wherein the first and/or second strand further comprise up to about 20 additional nucleotides. A RNAi agent comprising a first and a second strand, wherein the sequence of the first and/or second strand is the sequence of a first and/or second strand of: AD-40036.1 (SEQ ID NOs: 1742 and 1780), or modified or unmodified variants thereof, wherein the first and/or second strand further comprise up to about 20 additional nucleotides.

[3040] A RNAi agent comprising a first and a second strand, wherein the sequence of the first and/or second strand is the sequence of a first and/or second strand of: AD-40008.1 (SEQ ID NOs: 1743 and 1781), or modified or unmodified variants thereof, wherein the first and/or second strand further comprise up to about 20 additional nucleotides.

[3041] A RNAi agent comprising a first and a second strand, wherein the sequence of the first and/or second strand is the sequence of a first and/or second strand of: AD-40021.1 (SEQ ID NOs: 1744 and 1782), or modified or unmodified variants thereof, wherein the first and/or second strand further comprise up to about 20 additional nucleotides.

[3042] A RNAi agent comprising a first and a second strand, wherein the sequence of the first and/or second strand is the sequence of a first and/or second strand of: AD-40077.1 (SEQ ID NOs: 1745 and 1783), or modified or unmodified variants thereof, wherein the first and/or second strand further comprise up to about 20 additional nucleotides.

[3043] A RNAi agent comprising a first and a second strand, wherein the sequence of the first and/or second strand is the sequence of a first and/or second strand of: AD-40072.1 (SEQ ID NOs: 1746 and 1784), or modified or unmodified variants thereof, wherein the first and/or second strand further comprise up to about 20 additional nucleotides.

[3044] A RNAi agent comprising a first and a second strand, wherein the sequence of the first and/or second strand is the sequence of a first and/or second strand of: AD-40061.1 (SEQ ID NOs: 1747 and 1785), or modified or unmodified variants thereof, wherein the first and/or second strand further comprise up to about 20 additional nucleotides.

[3045] A RNAi agent comprising a first and a second strand, wherein the sequence of the first and/or second strand is the sequence of a first and/or second strand of: AD-40068.1 (SEQ ID NOs: 1748 and 1786), or modified or unmodified variants thereof, wherein the first and/or second strand further comprise up to about 20 additional nucleotides.

[3046] A RNAi agent comprising a first and a second strand, wherein the sequence of the first and/or second strand is the sequence of a first and/or second strand of: AD-38131.1 (SEQ ID NOs: 1749 and 1787), or modified or unmodified variants thereof, wherein the first and/or second strand further comprise up to about 20 additional nucleotides.

[3047] A RNAi agent comprising a first and a second strand, wherein the sequence of the first and/or second strand is the sequence of a first and/or second strand of: AD-38167.1 (SEQ ID NOs: 1750 and 1788), or modified or unmodified variants thereof, wherein the first and/or second strand further comprise up to about 20 additional nucleotides.

[3048] A RNAi agent comprising a first and a second strand, wherein the sequence of the first and/or second strand is the sequence of a first and/or second strand of: hs_KRAS 1273_A22S26 (SEQ ID NOs: 1751 and 1789), or modified or unmodified variants thereof, wherein the first and/or second strand further comprise up to about 20 additional nucleotides. A RNAi agent comprising a first and a second strand, wherein the sequence of the first and/or second strand is the sequence of a first and/or second strand of: hs_KRAS 2892_A37S26 (SEQ ID NOs: 1752 and 1790), or modified or unmodified variants thereof, wherein the first and/or second strand further comprise up to about 20 additional nucleotides.

[3049] A RNAi agent comprising a first and a second strand, wherein the sequence of the first and/or second strand is the sequence of a first and/or second strand of: hs_KRAS 4731_A22S26 (SEQ ID NOs: 1753 and 1791), or modified or unmodified variants thereof, wherein the first and/or second strand further comprise up to about 20 additional nucleotides.

[3050] In various embodiments, the disclosure comprises a RNAi agent comprising a sense and an antisense strand, wherein the antisense strand comprises at least 15 contiguous nucleotides differing by 0, 1, 2, or 3 nt from the antisense strand of any RNAi agent disclosed herein, or modified or unmodified variants thereof, wherein the antisense strand optionally further comprises 0, 1, 2, 3, 4, 5, 6, 7, 8, 9, or 10 or more nt (or any range thereof, e.g., 0-1, 1-2, 1-3, 1-4 nt, etc.).

[3051] In one embodiment, the disclosure comprises any one or more RNAi agent listed herein.

Specific Embodiments Wherein the Sequences of the First and/or Second Strands are the Sequences of the First and/or Second Strand of a RNAi Agent Disclosed Herein, Further Comprising Up to about 20 Additional Nucleotides

[3052] In one embodiment, the present disclosure pertains to a composition comprising any one or more of: a RNAi agent comprising a first and a second strand, wherein the sequence of the first and/or second strand comprise a sequence of 15 contiguous nt from the sequence of a first and/or second strand of any RNAi agent from any of Tables 1 to 6, or modified and unmodified variants thereof.

[3053] Thus, in various embodiments, the present disclosure pertains to a composition comprising any one or more of the following: A RNAi agent comprising a first and a second strand, wherein the sequence of the first and/or second strand comprise a sequence of 15 contiguous nt from the sequence of a first and/or second strand of: AD-35523.3 (SEQ ID NOs: 1 and 428), or a modified or unmodified variant thereof.

[3054] A RNAi agent comprising a first and a second strand, wherein the sequence of the first and/or second strand comprise a sequence of 15 contiguous nt from the sequence of a first and/or second strand of: AD-35529.1 (SEQ ID NOs: 2 and 429), or a modified or unmodified variant thereof.

[3055] A RNAi agent comprising a first and a second strand, wherein the sequence of the first and/or second strand comprise a sequence of 15 contiguous nt from the sequence of a first and/or second strand of: AD-35535.4 (SEQ ID NOs: 3 and 430), or a modified or unmodified variant thereof.

[3056] A RNAi agent comprising a first and a second strand, wherein the sequence of the first and/or second strand comprise a sequence of 15 contiguous nt from the sequence of a first and/or second strand of: AD-35541.4 (SEQ ID NOs: 4 and 431), or a modified or unmodified variant thereof.

[3057] A RNAi agent comprising a first and a second strand, wherein the sequence of the first and/or second strand comprise a sequence of 15 contiguous nt from the sequence of a first and/or second strand of: AD-35547.4 (SEQ ID NOs: 5 and 432), or a modified or unmodified variant thereof.

[3058] A RNAi agent comprising a first and a second strand, wherein the sequence of the first and/or second strand comprise a sequence of 15 contiguous nt from the sequence of a first and/or second strand of: AD-35553.4 (SEQ ID NOs: 6 and 433), or a modified or unmodified variant thereof.

[3059] A RNAi agent comprising a first and a second strand, wherein the sequence of the first and/or second strand comprise a sequence of 15 contiguous nt from the sequence of a first and/or second strand of: AD-35559.4 (SEQ ID NOs: 7 and 434), or a modified or unmodified variant thereof.

[3060] A RNAi agent comprising a first and a second strand, wherein the sequence of the first and/or second strand comprise a sequence of 15 contiguous nt from the sequence of a first and/or second strand of: AD-35565.4 (SEQ ID NOs: 8 and 435), or a modified or unmodified variant thereof.

[3061] A RNAi agent comprising a first and a second strand, wherein the sequence of the first and/or second strand comprise a sequence of 15 contiguous nt from the sequence of a first and/or second strand of: AD-35524.4 (SEQ ID NOs: 9 and 436), or a modified or unmodified variant thereof.

[3062] A RNAi agent comprising a first and a second strand, wherein the sequence of the first and/or second strand comprise a sequence of 15 contiguous nt from the sequence of a first and/or second strand of: AD-35530.4 (SEQ ID NOs: 10 and 437), or a modified or unmodified variant thereof.

[3063] A RNAi agent comprising a first and a second strand, wherein the sequence of the first and/or second strand comprise a sequence of 15 contiguous nt from the sequence of a first and/or second strand of: AD-35536.4 (SEQ ID NOs: 11 and 438), or a modified or unmodified variant thereof.

[3064] A RNAi agent comprising a first and a second strand, wherein the sequence of the first and/or second strand comprise a sequence of 15 contiguous nt from the sequence of a first and/or second strand of: AD-35542.4 (SEQ ID NOs: 12 and 439), or a modified or unmodified variant thereof.

[3065] A RNAi agent comprising a first and a second strand, wherein the sequence of the first and/or second strand comprise a sequence of 15 contiguous nt from the sequence of a first and/or second strand of: AD-35548.4 (SEQ ID NOs: 13 and 440), or a modified or unmodified variant thereof.

[3066] A RNAi agent comprising a first and a second strand, wherein the sequence of the first and/or second strand comprise a sequence of 15 contiguous nt from the sequence of a first and/or second strand of: AD-35554.4 (SEQ ID NOs: 14 and 441), or a modified or unmodified variant thereof.

[3067] A RNAi agent comprising a first and a second strand, wherein the sequence of the first and/or second strand comprise a sequence of 15 contiguous nt from the sequence of a first and/or second strand of: AD-35560.2 (SEQ ID NOs: 15 and 442), or a modified or unmodified variant thereof.

[3068] A RNAi agent comprising a first and a second strand, wherein the sequence of the first and/or second strand comprise a sequence of 15 contiguous nt from the sequence of a first and/or second strand of: AD-35566.4 (SEQ ID NOs: 16 and 443), or a modified or unmodified variant thereof.

[3069] A RNAi agent comprising a first and a second strand, wherein the sequence of the first and/or second strand comprise a sequence of 15 contiguous nt from the sequence of a first and/or second strand of: AD-35525.2 (SEQ ID NOs: 17 and 444), or a modified or unmodified variant thereof.

[3070] A RNAi agent comprising a first and a second strand, wherein the sequence of the first and/or second strand comprise a sequence of 15 contiguous nt from the sequence of a first and/or second strand of: AD-35531.4 (SEQ ID NOs: 18 and 445), or a modified or unmodified variant thereof.

[3071] A RNAi agent comprising a first and a second strand, wherein the sequence of the first and/or second strand comprise a sequence of 15 contiguous nt from the sequence of a first and/or second strand of: AD-35537.4 (SEQ ID NOs: 19 and 446), or a modified or unmodified variant thereof.

[3072] A RNAi agent comprising a first and a second strand, wherein the sequence of the first and/or second strand comprise a sequence of 15 contiguous nt from the sequence of a first and/or second strand of: AD-35543.2 (SEQ ID NOs: 20 and 447), or a modified or unmodified variant thereof.

[3073] A RNAi agent comprising a first and a second strand, wherein the sequence of the first and/or second strand comprise a sequence of 15 contiguous nt from the sequence of a first and/or second strand of: AD-35549.4 (SEQ ID NOs: 21 and 448), or a modified or unmodified variant thereof.

[3074] A RNAi agent comprising a first and a second strand, wherein the sequence of the first and/or second strand comprise a sequence of 15 contiguous nt from the sequence of a first and/or second strand of: AD-35555.4 (SEQ ID NOs: 22 and 449), or a modified or unmodified variant thereof.

[3075] A RNAi agent comprising a first and a second strand, wherein the sequence of the first and/or second strand comprise a sequence of 15 contiguous nt from the sequence of a first and/or second strand of: AD-35561.4 (SEQ ID NOs: 23 and 450), or a modified or unmodified variant thereof.

[3076] A RNAi agent comprising a first and a second strand, wherein the sequence of the first and/or second strand comprise a sequence of 15 contiguous nt from the sequence of a first and/or second strand of: AD-35567.4 (SEQ ID NOs: 24 and 451), or a modified or unmodified variant thereof.

[3077] A RNAi agent comprising a first and a second strand, wherein the sequence of the first and/or second strand comprise a sequence of 15 contiguous nt from the sequence of a first and/or second strand of: AD-35526.4 (SEQ ID NOs: 25 and 452), or a modified or unmodified variant thereof.

[3078] A RNAi agent comprising a first and a second strand, wherein the sequence of the first and/or second strand comprise a sequence of 15 contiguous nt from the sequence of a first and/or second strand of: AD-35532.4 (SEQ ID NOs: 26 and 453), or a modified or unmodified variant thereof.

[3079] A RNAi agent comprising a first and a second strand, wherein the sequence of the first and/or second strand comprise a sequence of 15 contiguous nt from the sequence of a first and/or second strand of: AD-35538.4 (SEQ ID NOs: 27 and 454), or a modified or unmodified variant thereof.

[3080] A RNAi agent comprising a first and a second strand, wherein the sequence of the first and/or second strand comprise a sequence of 15 contiguous nt from the sequence of a first and/or second strand of: AD-35544.4 (SEQ ID NOs: 28 and 455), or a modified or unmodified variant thereof.

[3081] A RNAi agent comprising a first and a second strand, wherein the sequence of the first and/or second strand comprise a sequence of 15 contiguous nt from the sequence of a first and/or second strand of: AD-35550.4 (SEQ ID NOs: 29 and 456), or a modified or unmodified variant thereof.

[3082] A RNAi agent comprising a first and a second strand, wherein the sequence of the first and/or second strand comprise a sequence of 15 contiguous nt from the sequence of a first and/or second strand of: AD-35556.4 (SEQ ID NOs: 30 and 457), or a modified or unmodified variant thereof.

[3083] A RNAi agent comprising a first and a second strand, wherein the sequence of the first and/or second strand comprise a sequence of 15 contiguous nt from the sequence of a first and/or second strand of: AD-35562.4 (SEQ ID NOs: 31 and 458), or a modified or unmodified variant thereof.

[3084] A RNAi agent comprising a first and a second strand, wherein the sequence of the first and/or second strand comprise a sequence of 15 contiguous nt from the sequence of a first and/or second strand of: AD-35568.4 (SEQ ID NOs: 32 and 459), or a modified or unmodified variant thereof. A RNAi agent comprising a first and a second strand, wherein the sequence of the first and/or second strand comprise a sequence of 15 contiguous nt from the sequence of a first and/or second strand of: AD-35527.4 (SEQ ID NOs: 33 and 460), or a modified or unmodified variant thereof.

[3085] A RNAi agent comprising a first and a second strand, wherein the sequence of the first and/or second strand comprise a sequence of 15 contiguous nt from the sequence of a first and/or second strand of: AD-35533.4 (SEQ ID NOs: 34 and 461), or a modified or unmodified variant thereof.

[3086] A RNAi agent comprising a first and a second strand, wherein the sequence of the first and/or second strand comprise a sequence of 15 contiguous nt from the sequence of a first and/or second strand of: AD-35539.4 (SEQ ID NOs: 35 and 462), or a modified or unmodified variant thereof.

[3087] A RNAi agent comprising a first and a second strand, wherein the sequence of the first and/or second strand comprise a sequence of 15 contiguous nt from the sequence of a first and/or second strand of: AD-35545.4 (SEQ ID NOs: 36 and 463), or a modified or unmodified variant thereof.

[3088] A RNAi agent comprising a first and a second strand, wherein the sequence of the first and/or second strand comprise a sequence of 15 contiguous nt from the sequence of a first and/or second strand of: AD-35551.4 (SEQ ID NOs: 37 and 464), or a modified or unmodified variant thereof.

[3089] A RNAi agent comprising a first and a second strand, wherein the sequence of the first and/or second strand comprise a sequence of 15 contiguous nt from the sequence of a first and/or second strand of: AD-35563.4 (SEQ ID NOs: 38 and 465), or a modified or unmodified variant thereof.

[3090] A RNAi agent comprising a first and a second strand, wherein the sequence of the first and/or second strand comprise a sequence of 15 contiguous nt from the sequence of a first and/or second strand of: AD-35528.4 (SEQ ID NOs: 39 and 466), or a modified or unmodified variant thereof.

[3091] A RNAi agent comprising a first and a second strand, wherein the sequence of the first and/or second strand comprise a sequence of 15 contiguous nt from the sequence of a first and/or second strand of: AD-35540.4 (SEQ ID NOs: 40 and 467), or a modified or unmodified variant thereof.

[3092] A RNAi agent comprising a first and a second strand, wherein the sequence of the first and/or second strand comprise a sequence of 15 contiguous nt from the sequence of a first and/or second strand of: AD-35546.4 (SEQ ID NOs: 41 and 468), or a modified or unmodified variant thereof.

[3093] A RNAi agent comprising a first and a second strand, wherein the sequence of the first and/or second strand comprise a sequence of 15 contiguous nt from the sequence of a first and/or second strand of: AD-35552.4 (SEQ ID NOs: 42 and 469), or a modified or unmodified variant thereof.

[3094] A RNAi agent comprising a first and a second strand, wherein the sequence of the first and/or second strand comprise a sequence of 15 contiguous nt from the sequence of a first and/or second strand of: AD-35558.4 (SEQ ID NOs: 43 and 470), or a modified or unmodified variant thereof.

[3095] A RNAi agent comprising a first and a second strand, wherein the sequence of the first and/or second strand comprise a sequence of 15 contiguous nt from the sequence of a first and/or second strand of: AD-35564.4 (SEQ ID NOs: 44 and 471), or a modified or unmodified variant thereof.

[3096] A RNAi agent comprising a first and a second strand, wherein the sequence of the first and/or second strand comprise a sequence of 15 contiguous nt from the sequence of a first and/or second strand of: AD-35570.4 (SEQ ID NOs: 45 and 472), or a modified or unmodified variant thereof.

[3097] A RNAi agent comprising a first and a second strand, wherein the sequence of the first and/or second strand comprise a sequence of 15 contiguous nt from the sequence of a first and/or second strand of: AD-35571.4 (SEQ ID NOs: 46 and 473), or a modified or unmodified variant thereof.

[3098] A RNAi agent comprising a first and a second strand, wherein the sequence of the first and/or second strand comprise a sequence of 15 contiguous nt from the sequence of a first and/or second strand of: AD-35577.4 (SEQ ID NOs: 47 and 474), or a modified or unmodified variant thereof.

[3099] A RNAi agent comprising a first and a second strand, wherein the sequence of the first and/or second strand comprise a sequence of 15 contiguous nt from the sequence of a first and/or second strand of: AD-35583.4 (SEQ ID NOs: 48 and 475), or a modified or unmodified variant thereof.

[3100] A RNAi agent comprising a first and a second strand, wherein the sequence of the first and/or second strand comprise a sequence of 15 contiguous nt from the sequence of a first and/or second strand of: AD-35589.4 (SEQ ID NOs: 49 and 476), or a modified or unmodified variant thereof.

[3101] A RNAi agent comprising a first and a second strand, wherein the sequence of the first and/or second strand comprise a sequence of 15 contiguous nt from the sequence of a first and/or second strand of: AD-35595.4 (SEQ ID NOs: 50 and 477), or a modified or unmodified variant thereof.

[3102] A RNAi agent comprising a first and a second strand, wherein the sequence of the first and/or second strand comprise a sequence of 15 contiguous nt from the sequence of a first and/or second strand of: AD-35601.4 (SEQ ID NOs: 51 and 478), or a modified or unmodified variant thereof.

[3103] A RNAi agent comprising a first and a second strand, wherein the sequence of the first and/or second strand comprise a sequence of 15 contiguous nt from the sequence of a first and/or second strand of: AD-35607.4 (SEQ ID NOs: 52 and 479), or a modified or unmodified variant thereof.

[3104] A RNAi agent comprising a first and a second strand, wherein the sequence of the first and/or second strand comprise a sequence of 15 contiguous nt from the sequence of a first and/or second strand of: AD-35613.4 (SEQ ID NOs: 53 and 480), or a modified or unmodified variant thereof.

[3105] A RNAi agent comprising a first and a second strand, wherein the sequence of the first and/or second strand comprise a sequence of 15 contiguous nt from the sequence of a first and/or second strand of: AD-35572.4 (SEQ ID NOs: 54 and 481), or a modified or unmodified variant thereof.

[3106] A RNAi agent comprising a first and a second strand, wherein the sequence of the first and/or second strand comprise a sequence of 15 contiguous nt from the sequence of a first and/or second strand of: AD-35578.4 (SEQ ID NOs: 55 and 482), or a modified or unmodified variant thereof.

[3107] A RNAi agent comprising a first and a second strand, wherein the sequence of the first and/or second strand comprise a sequence of 15 contiguous nt from the sequence of a first and/or second strand of: AD-35584.4 (SEQ ID NOs: 56 and 483), or a modified or unmodified variant thereof.

[3108] A RNAi agent comprising a first and a second strand, wherein the sequence of the first and/or second strand comprise a sequence of 15 contiguous nt from the sequence of a first and/or second strand of: AD-35590.4 (SEQ ID NOs: 57 and 484), or a modified or unmodified variant thereof.

[3109] A RNAi agent comprising a first and a second strand, wherein the sequence of the first and/or second strand comprise a sequence of 15 contiguous nt from the sequence of a first and/or second strand of: AD-35596.4 (SEQ ID NOs: 58 and 485), or a modified or unmodified variant thereof.

[3110] A RNAi agent comprising a first and a second strand, wherein the sequence of the first and/or second strand comprise a sequence of 15 contiguous nt from the sequence of a first and/or second strand of: AD-35602.4 (SEQ ID NOs: 59 and 486), or a modified or unmodified variant thereof.

[3111] A RNAi agent comprising a first and a second strand, wherein the sequence of the first and/or second strand comprise a sequence of 15 contiguous nt from the sequence of a first and/or second strand of: AD-35608.4 (SEQ ID NOs: 60 and 487), or a modified or unmodified variant thereof.

[3112] A RNAi agent comprising a first and a second strand, wherein the sequence of the first and/or second strand comprise a sequence of 15 contiguous nt from the sequence of a first and/or second strand of: AD-35614.4 (SEQ ID NOs: 61 and 488), or a modified or unmodified variant thereof.

[3113] A RNAi agent comprising a first and a second strand, wherein the sequence of the first and/or second strand comprise a sequence of 15 contiguous nt from the sequence of a first and/or second strand of: AD-35573.4 (SEQ ID NOs: 62 and 489), or a modified or unmodified variant thereof.

[3114] A RNAi agent comprising a first and a second strand, wherein the sequence of the first and/or second strand comprise a sequence of 15 contiguous nt from the sequence of a first and/or second strand of: AD-35579.4 (SEQ ID NOs: 63 and 490), or a modified or unmodified variant thereof.

[3115] A RNAi agent comprising a first and a second strand, wherein the sequence of the first and/or second strand comprise a sequence of 15 contiguous nt from the sequence of a first and/or second strand of: AD-35585.4 (SEQ ID NOs: 64 and 491), or a modified or unmodified variant thereof.

[3116] A RNAi agent comprising a first and a second strand, wherein the sequence of the first and/or second strand comprise a sequence of 15 contiguous nt from the sequence of a first and/or second strand of: AD-35591.4 (SEQ ID NOs: 65 and 492), or a modified or unmodified variant thereof.

[3117] A RNAi agent comprising a first and a second strand, wherein the sequence of the first and/or second strand comprise a sequence of 15 contiguous nt from the sequence of a first and/or second strand of: AD-35597.4 (SEQ ID NOs: 66 and 493), or a modified or unmodified variant thereof.

[3118] A RNAi agent comprising a first and a second strand, wherein the sequence of the first and/or second strand comprise a sequence of 15 contiguous nt from the sequence of a first and/or second strand of: AD-35603.4 (SEQ ID NOs: 67 and 494), or a modified or unmodified variant thereof.

[3119] A RNAi agent comprising a first and a second strand, wherein the sequence of the first and/or second strand comprise a sequence of 15 contiguous nt from the sequence of a first and/or second strand of: AD-35609.4 (SEQ ID NOs: 68 and 495), or a modified or unmodified variant thereof.

[3120] A RNAi agent comprising a first and a second strand, wherein the sequence of the first and/or second strand comprise a sequence of 15 contiguous nt from the sequence of a first and/or second strand of: AD-35615.4 (SEQ ID NOs: 69 and 496), or a modified or unmodified variant thereof.

[3121] A RNAi agent comprising a first and a second strand, wherein the sequence of the first and/or second strand comprise a sequence of 15 contiguous nt from the sequence of a first and/or second strand of: AD-35574.4 (SEQ ID NOs: 70 and 497), or a modified or unmodified variant thereof.

[3122] A RNAi agent comprising a first and a second strand, wherein the sequence of the first and/or second strand comprise a sequence of 15 contiguous nt from the sequence of a first and/or second strand of: AD-35580.1 (SEQ ID NOs: 71 and 498), or a modified or unmodified variant thereof.

[3123] A RNAi agent comprising a first and a second strand, wherein the sequence of the first and/or second strand comprise a sequence of 15 contiguous nt from the sequence of a first and/or second strand of: AD-35586.4 (SEQ ID NOs: 72 and 499), or a modified or unmodified variant thereof. A RNAi agent comprising a first and a second strand, wherein the sequence of the first and/or second strand comprise a sequence of 15 contiguous nt from the sequence of a first and/or second strand of: AD-35592.4 (SEQ ID NOs: 73 and 500), or a modified or unmodified variant thereof.

[3124] A RNAi agent comprising a first and a second strand, wherein the sequence of the first and/or second strand comprise a sequence of 15 contiguous nt from the sequence of a first and/or second strand of: AD-35598.4 (SEQ ID NOs: 74 and 501), or a modified or unmodified variant thereof.

[3125] A RNAi agent comprising a first and a second strand, wherein the sequence of the first and/or second strand comprise a sequence of 15 contiguous nt from the sequence of a first and/or second strand of: AD-35604.4 (SEQ ID NOs: 75 and 502), or a modified or unmodified variant thereof.

[3126] A RNAi agent comprising a first and a second strand, wherein the sequence of the first and/or second strand comprise a sequence of 15 contiguous nt from the sequence of a first and/or second strand of: AD-35610.4 (SEQ ID NOs: 76 and 503), or a modified or unmodified variant thereof.

[3127] A RNAi agent comprising a first and a second strand, wherein the sequence of the first and/or second strand comprise a sequence of 15 contiguous nt from the sequence of a first and/or second strand of: AD-35616.4 (SEQ ID NOs: 77 and 504), or a modified or unmodified variant thereof.

[3128] A RNAi agent comprising a first and a second strand, wherein the sequence of the first and/or second strand comprise a sequence of 15 contiguous nt from the sequence of a first and/or second strand of: AD-35575.4 (SEQ ID NOs: 78 and 505), or a modified or unmodified variant thereof.

[3129] A RNAi agent comprising a first and a second strand, wherein the sequence of the first and/or second strand comprise a sequence of 15 contiguous nt from the sequence of a first and/or second strand of: AD-35581.4 (SEQ ID NOs: 79 and 506), or a modified or unmodified variant thereof.

[3130] A RNAi agent comprising a first and a second strand, wherein the sequence of the first and/or second strand comprise a sequence of 15 contiguous nt from the sequence of a first and/or second strand of: AD-35587.4 (SEQ ID NOs: 80 and 507), or a modified or unmodified variant thereof.

[3131] A RNAi agent comprising a first and a second strand, wherein the sequence of the first and/or second strand comprise a sequence of 15 contiguous nt from the sequence of a first and/or second strand of: AD-35593.4 (SEQ ID NOs: 81 and 508), or a modified or unmodified variant thereof.

[3132] A RNAi agent comprising a first and a second strand, wherein the sequence of the first and/or second strand comprise a sequence of 15 contiguous nt from the sequence of a first and/or second strand of: AD-35599.4 (SEQ ID NOs: 82 and 509), or a modified or unmodified variant thereof.

[3133] A RNAi agent comprising a first and a second strand, wherein the sequence of the first and/or second strand comprise a sequence of 15 contiguous nt from the sequence of a first and/or second strand of: AD-35605.4 (SEQ ID NOs: 83 and 510), or a modified or unmodified variant thereof.

[3134] A RNAi agent comprising a first and a second strand, wherein the sequence of the first and/or second strand comprise a sequence of 15 contiguous nt from the sequence of a first and/or second strand of: AD-35611.4 (SEQ ID NOs: 84 and 511), or a modified or unmodified variant thereof.

[3135] A RNAi agent comprising a first and a second strand, wherein the sequence of the first and/or second strand comprise a sequence of 15 contiguous nt from the sequence of a first and/or second strand of: AD-35617.4 (SEQ ID NOs: 85 and 512), or a modified or unmodified variant thereof.

[3136] A RNAi agent comprising a first and a second strand, wherein the sequence of the first and/or second strand comprise a sequence of 15 contiguous nt from the sequence of a first and/or second strand of: AD-35576.4 (SEQ ID NOs: 86 and 513), or a modified or unmodified variant thereof.

[3137] A RNAi agent comprising a first and a second strand, wherein the sequence of the first and/or second strand comprise a sequence of 15 contiguous nt from the sequence of a first and/or second strand of: AD-35588.4 (SEQ ID NOs: 87 and 514), or a modified or unmodified variant thereof.

[3138] A RNAi agent comprising a first and a second strand, wherein the sequence of the first and/or second strand comprise a sequence of 15 contiguous nt from the sequence of a first and/or second strand of: AD-35667.1 (SEQ ID NOs: 88 and 515), or a modified or unmodified variant thereof.

[3139] A RNAi agent comprising a first and a second strand, wherein the sequence of the first and/or second strand comprise a sequence of 15 contiguous nt from the sequence of a first and/or second strand of: AD-35673.1 (SEQ ID NOs: 89 and 516), or a modified or unmodified variant thereof.

[3140] A RNAi agent comprising a first and a second strand, wherein the sequence of the first and/or second strand comprise a sequence of 15 contiguous nt from the sequence of a first and/or second strand of: AD-35679.1 (SEQ ID NOs: 90 and 517), or a modified or unmodified variant thereof.

[3141] A RNAi agent comprising a first and a second strand, wherein the sequence of the first and/or second strand comprise a sequence of 15 contiguous nt from the sequence of a first and/or second strand of: AD-35685.1 (SEQ ID NOs: 91 and 518), or a modified or unmodified variant thereof.

[3142] A RNAi agent comprising a first and a second strand, wherein the sequence of the first and/or second strand comprise a sequence of 15 contiguous nt from the sequence of a first and/or second strand of: AD-35691.1 (SEQ ID NOs: 92 and 519), or a modified or unmodified variant thereof.

[3143] A RNAi agent comprising a first and a second strand, wherein the sequence of the first and/or second strand comprise a sequence of 15 contiguous nt from the sequence of a first and/or second strand of: AD-35557.1 (SEQ ID NOs: 93 and 520), or a modified or unmodified variant thereof.

[3144] A RNAi agent comprising a first and a second strand, wherein the sequence of the first and/or second strand comprise a sequence of 15 contiguous nt from the sequence of a first and/or second strand of: AD-35618.1 (SEQ ID NOs: 94 and 521), or a modified or unmodified variant thereof.

[3145] A RNAi agent comprising a first and a second strand, wherein the sequence of the first and/or second strand comprise a sequence of 15 contiguous nt from the sequence of a first and/or second strand of: AD-35569.1 (SEQ ID NOs: 95 and 522), or a modified or unmodified variant thereof.

[3146] A RNAi agent comprising a first and a second strand, wherein the sequence of the first and/or second strand comprise a sequence of 15 contiguous nt from the sequence of a first and/or second strand of: AD-35534.1 (SEQ ID NOs: 96 and 523), or a modified or unmodified variant thereof.

[3147] A RNAi agent comprising a first and a second strand, wherein the sequence of the first and/or second strand comprise a sequence of 15 contiguous nt from the sequence of a first and/or second strand of: AD-35582.1 (SEQ ID NOs: 97 and 524), or a modified or unmodified variant thereof.

[3148] A RNAi agent comprising a first and a second strand, wherein the sequence of the first and/or second strand comprise a sequence of 15 contiguous nt from the sequence of a first and/or second strand of: AD-35594.1 (SEQ ID NOs: 98 and 525), or a modified or unmodified variant thereof.

[3149] A RNAi agent comprising a first and a second strand, wherein the sequence of the first and/or second strand comprise a sequence of 15 contiguous nt from the sequence of a first and/or second strand of: AD-35600.1 (SEQ ID NOs: 99 and 526), or a modified or unmodified variant thereof.

[3150] A RNAi agent comprising a first and a second strand, wherein the sequence of the first and/or second strand comprise a sequence of 15 contiguous nt from the sequence of a first and/or second strand of: AD-35606.1 (SEQ ID NOs: 100 and 527), or a modified or unmodified variant thereof.

[3151] A RNAi agent comprising a first and a second strand, wherein the sequence of the first and/or second strand comprise a sequence of 15 contiguous nt from the sequence of a first and/or second strand of: AD-35612.1 (SEQ ID NOs: 101 and 528), or a modified or unmodified variant thereof.

[3152] A RNAi agent comprising a first and a second strand, wherein the sequence of the first and/or second strand comprise a sequence of 15 contiguous nt from the sequence of a first and/or second strand of: AD-38127.1 (SEQ ID NOs: 102 and 529), or a modified or unmodified variant thereof.

[3153] A RNAi agent comprising a first and a second strand, wherein the sequence of the first and/or second strand comprise a sequence of 15 contiguous nt from the sequence of a first and/or second strand of: AD-38133.1 (SEQ ID NOs: 103 and 530), or a modified or unmodified variant thereof.

[3154] A RNAi agent comprising a first and a second strand, wherein the sequence of the first and/or second strand comprise a sequence of 15 contiguous nt from the sequence of a first and/or second strand of: AD-38139.1 (SEQ ID NOs: 104 and 531), or a modified or unmodified variant thereof.

[3155] A RNAi agent comprising a first and a second strand, wherein the sequence of the first and/or second strand comprise a sequence of 15 contiguous nt from the sequence of a first and/or second strand of: AD-38145.1 (SEQ ID NOs: 105 and 532), or a modified or unmodified variant thereof.

[3156] A RNAi agent comprising a first and a second strand, wherein the sequence of the first and/or second strand comprise a sequence of 15 contiguous nt from the sequence of a first and/or second strand of: AD-38151.1 (SEQ ID NOs: 106 and 533), or a modified or unmodified variant thereof.

[3157] A RNAi agent comprising a first and a second strand, wherein the sequence of the first and/or second strand comprise a sequence of 15 contiguous nt from the sequence of a first and/or second strand of: AD-38157.1 (SEQ ID NOs: 107 and 534), or a modified or unmodified variant thereof.

[3158] A RNAi agent comprising a first and a second strand, wherein the sequence of the first and/or second strand comprise a sequence of 15 contiguous nt from the sequence of a first and/or second strand of: AD-38163.1 (SEQ ID NOs: 108 and 535), or a modified or unmodified variant thereof.

[3159] A RNAi agent comprising a first and a second strand, wherein the sequence of the first and/or second strand comprise a sequence of 15 contiguous nt from the sequence of a first and/or second strand of: AD-38169.1 (SEQ ID NOs: 109 and 536), or a modified or unmodified variant thereof.

[3160] A RNAi agent comprising a first and a second strand, wherein the sequence of the first and/or second strand comprise a sequence of 15 contiguous nt from the sequence of a first and/or second strand of: AD-38128.1 (SEQ ID NOs: 110 and 537), or a modified or unmodified variant thereof.

[3161] A RNAi agent comprising a first and a second strand, wherein the sequence of the first and/or second strand comprise a sequence of 15 contiguous nt from the sequence of a first and/or second strand of: AD-38134.1 (SEQ ID NOs: 111 and 538), or a modified or unmodified variant thereof.

[3162] A RNAi agent comprising a first and a second strand, wherein the sequence of the first and/or second strand comprise a sequence of 15 contiguous nt from the sequence of a first and/or second strand of: AD-38140.1 (SEQ ID NOs: 112 and 539), or a modified or unmodified variant thereof. A RNAi agent comprising a first and a second strand, wherein the sequence of the first and/or second strand comprise a sequence of 15 contiguous nt from the sequence of a first and/or second strand of: AD-38146.1 (SEQ ID NOs: 113 and 540), or a modified or unmodified variant thereof.

[3163] A RNAi agent comprising a first and a second strand, wherein the sequence of the first and/or second strand comprise a sequence of 15 contiguous nt from the sequence of a first and/or second strand of: AD-38152.1 (SEQ ID NOs: 114 and 541), or a modified or unmodified variant thereof.

[3164] A RNAi agent comprising a first and a second strand, wherein the sequence of the first and/or second strand comprise a sequence of 15 contiguous nt from the sequence of a first and/or second strand of: AD-38158.1 (SEQ ID NOs: 115 and 542), or a modified or unmodified variant thereof.

[3165] A RNAi agent comprising a first and a second strand, wherein the sequence of the first and/or second strand comprise a sequence of 15 contiguous nt from the sequence of a first and/or second strand of: AD-38164.1 (SEQ ID NOs: 116 and 543), or a modified or unmodified variant thereof.

[3166] A RNAi agent comprising a first and a second strand, wherein the sequence of the first and/or second strand comprise a sequence of 15 contiguous nt from the sequence of a first and/or second strand of: AD-38170.1 (SEQ ID NOs: 117 and 544), or a modified or unmodified variant thereof.

[3167] A RNAi agent comprising a first and a second strand, wherein the sequence of the first and/or second strand comprise a sequence of 15 contiguous nt from the sequence of a first and/or second strand of: AD-38129.1 (SEQ ID NOs: 118 and 545), or a modified or unmodified variant thereof.

[3168] A RNAi agent comprising a first and a second strand, wherein the sequence of the first and/or second strand comprise a sequence of 15 contiguous nt from the sequence of a first and/or second strand of: AD-38135.1 (SEQ ID NOs: 119 and 546), or a modified or unmodified variant thereof.

[3169] A RNAi agent comprising a first and a second strand, wherein the sequence of the first and/or second strand comprise a sequence of 15 contiguous nt from the sequence of a first and/or second strand of: AD-38141.1 (SEQ ID NOs: 120 and 547), or a modified or unmodified variant thereof.

[3170] A RNAi agent comprising a first and a second strand, wherein the sequence of the first and/or second strand comprise a sequence of 15 contiguous nt from the sequence of a first and/or second strand of: AD-38147.1 (SEQ ID NOs: 121 and 548), or a modified or unmodified variant thereof.

[3171] A RNAi agent comprising a first and a second strand, wherein the sequence of the first and/or second strand comprise a sequence of 15 contiguous nt from the sequence of a first and/or second strand of: AD-38153.1 (SEQ ID NOs: 122 and 549), or a modified or unmodified variant thereof.

[3172] A RNAi agent comprising a first and a second strand, wherein the sequence of the first and/or second strand comprise a sequence of 15 contiguous nt from the sequence of a first and/or second strand of: AD-38159.1 (SEQ ID NOs: 123 and 550), or a modified or unmodified variant thereof.

[3173] A RNAi agent comprising a first and a second strand, wherein the sequence of the first and/or second strand comprise a sequence of 15 contiguous nt from the sequence of a first and/or second strand of: AD-38165.1 (SEQ ID NOs: 124 and 551), or a modified or unmodified variant thereof.

[3174] A RNAi agent comprising a first and a second strand, wherein the sequence of the first and/or second strand comprise a sequence of 15 contiguous nt from the sequence of a first and/or second strand of: AD-38171.1 (SEQ ID NOs: 125 and 552), or a modified or unmodified variant thereof.

[3175] A RNAi agent comprising a first and a second strand, wherein the sequence of the first and/or second strand comprise a sequence of 15 contiguous nt from the sequence of a first and/or second strand of: AD-38130.1 (SEQ ID NOs: 126 and 553), or a modified or unmodified variant thereof.

[3176] A RNAi agent comprising a first and a second strand, wherein the sequence of the first and/or second strand comprise a sequence of 15 contiguous nt from the sequence of a first and/or second strand of: AD-38136.1 (SEQ ID NOs: 127 and 554), or a modified or unmodified variant thereof.

[3177] A RNAi agent comprising a first and a second strand, wherein the sequence of the first and/or second strand comprise a sequence of 15 contiguous nt from the sequence of a first and/or second strand of: AD-38142.1 (SEQ ID NOs: 128 and 555), or a modified or unmodified variant thereof.

[3178] A RNAi agent comprising a first and a second strand, wherein the sequence of the first and/or second strand comprise a sequence of 15 contiguous nt from the sequence of a first and/or second strand of: AD-38148.1 (SEQ ID NOs: 129 and 556), or a modified or unmodified variant thereof.

[3179] A RNAi agent comprising a first and a second strand, wherein the sequence of the first and/or second strand comprise a sequence of 15 contiguous nt from the sequence of a first and/or second strand of: AD-38154.1 (SEQ ID NOs: 130 and 557), or a modified or unmodified variant thereof.

[3180] A RNAi agent comprising a first and a second strand, wherein the sequence of the first and/or second strand comprise a sequence of 15 contiguous nt from the sequence of a first and/or second strand of: AD-38160.1 (SEQ ID NOs: 131 and 558), or a modified or unmodified variant thereof.

[3181] A RNAi agent comprising a first and a second strand, wherein the sequence of the first and/or second strand comprise a sequence of 15 contiguous nt from the sequence of a first and/or second strand of: AD-38166.1 (SEQ ID NOs: 132 and 559), or a modified or unmodified variant thereof.

[3182] A RNAi agent comprising a first and a second strand, wherein the sequence of the first and/or second strand comprise a sequence of 15 contiguous nt from the sequence of a first and/or second strand of: AD-38172.1 (SEQ ID NOs: 133 and 560), or a modified or unmodified variant thereof.

[3183] A RNAi agent comprising a first and a second strand, wherein the sequence of the first and/or second strand comprise a sequence of 15 contiguous nt from the sequence of a first and/or second strand of: AD-38131.1 (SEQ ID NOs: 134 and 561), or a modified or unmodified variant thereof.

[3184] A RNAi agent comprising a first and a second strand, wherein the sequence of the first and/or second strand comprise a sequence of 15 contiguous nt from the sequence of a first and/or second strand of: AD-38137.1 (SEQ ID NOs: 135 and 562), or a modified or unmodified variant thereof.

[3185] A RNAi agent comprising a first and a second strand, wherein the sequence of the first and/or second strand comprise a sequence of 15 contiguous nt from the sequence of a first and/or second strand of: AD-38143.1 (SEQ ID NOs: 136 and 563), or a modified or unmodified variant thereof.

[3186] A RNAi agent comprising a first and a second strand, wherein the sequence of the first and/or second strand comprise a sequence of 15 contiguous nt from the sequence of a first and/or second strand of: AD-38149.1 (SEQ ID NOs: 137 and 564), or a modified or unmodified variant thereof.

[3187] A RNAi agent comprising a first and a second strand, wherein the sequence of the first and/or second strand comprise a sequence of 15 contiguous nt from the sequence of a first and/or second strand of: AD-38155.1 (SEQ ID NOs: 138 and 565), or a modified or unmodified variant thereof.

[3188] A RNAi agent comprising a first and a second strand, wherein the sequence of the first and/or second strand comprise a sequence of 15 contiguous nt from the sequence of a first and/or second strand of: AD-38161.1 (SEQ ID NOs: 139 and 566), or a modified or unmodified variant thereof.

[3189] A RNAi agent comprising a first and a second strand, wherein the sequence of the first and/or second strand comprise a sequence of 15 contiguous nt from the sequence of a first and/or second strand of: AD-38167.1 (SEQ ID NOs: 140 and 567), or a modified or unmodified variant thereof.

[3190] A RNAi agent comprising a first and a second strand, wherein the sequence of the first and/or second strand comprise a sequence of 15 contiguous nt from the sequence of a first and/or second strand of: AD-38173.1 (SEQ ID NOs: 141 and 568), or a modified or unmodified variant thereof.

[3191] A RNAi agent comprising a first and a second strand, wherein the sequence of the first and/or second strand comprise a sequence of 15 contiguous nt from the sequence of a first and/or second strand of: AD-38132.1 (SEQ ID NOs: 142 and 569), or a modified or unmodified variant thereof.

[3192] A RNAi agent comprising a first and a second strand, wherein the sequence of the first and/or second strand comprise a sequence of 15 contiguous nt from the sequence of a first and/or second strand of: AD-38138.1 (SEQ ID NOs: 143 and 570), or a modified or unmodified variant thereof.

[3193] A RNAi agent comprising a first and a second strand, wherein the sequence of the first and/or second strand comprise a sequence of 15 contiguous nt from the sequence of a first and/or second strand of: AD-38144.1 (SEQ ID NOs: 144 and 571), or a modified or unmodified variant thereof.

[3194] A RNAi agent comprising a first and a second strand, wherein the sequence of the first and/or second strand comprise a sequence of 15 contiguous nt from the sequence of a first and/or second strand of: AD-38150.1 (SEQ ID NOs: 145 and 572), or a modified or unmodified variant thereof.

[3195] A RNAi agent comprising a first and a second strand, wherein the sequence of the first and/or second strand comprise a sequence of 15 contiguous nt from the sequence of a first and/or second strand of: AD-38156.1 (SEQ ID NOs: 146 and 573), or a modified or unmodified variant thereof.

[3196] A RNAi agent comprising a first and a second strand, wherein the sequence of the first and/or second strand comprise a sequence of 15 contiguous nt from the sequence of a first and/or second strand of: AD-38162.1 (SEQ ID NOs: 147 and 574), or a modified or unmodified variant thereof.

[3197] A RNAi agent comprising a first and a second strand, wherein the sequence of the first and/or second strand comprise a sequence of 15 contiguous nt from the sequence of a first and/or second strand of: AD-38168.1 (SEQ ID NOs: 148 and 575), or a modified or unmodified variant thereof.

[3198] A RNAi agent comprising a first and a second strand, wherein the sequence of the first and/or second strand comprise a sequence of 15 contiguous nt from the sequence of a first and/or second strand of: AD-38174.1 (SEQ ID NOs: 149 and 576), or a modified or unmodified variant thereof.

[3199] A RNAi agent comprising a first and a second strand, wherein the sequence of the first and/or second strand comprise a sequence of 15 contiguous nt from the sequence of a first and/or second strand of: AD-39683.1 (SEQ ID NOs: 150 and 577), or a modified or unmodified variant thereof.

[3200] A RNAi agent comprising a first and a second strand, wherein the sequence of the first and/or second strand comprise a sequence of 15 contiguous nt from the sequence of a first and/or second strand of: AD-39689.1 (SEQ ID NOs: 151 and 578), or a modified or unmodified variant thereof.

[3201] A RNAi agent comprising a first and a second strand, wherein the sequence of the first and/or second strand comprise a sequence of 15 contiguous nt from the sequence of a first and/or second strand of: AD-39695.1 (SEQ ID NOs: 152 and 579), or a modified or unmodified variant thereof. A RNAi agent comprising a first and a second strand, wherein the sequence of the first and/or second strand comprise a sequence of 15 contiguous nt from the sequence of a first and/or second strand of: AD-39701.1 (SEQ ID NOs: 153 and 580), or a modified or unmodified variant thereof.

[3202] A RNAi agent comprising a first and a second strand, wherein the sequence of the first and/or second strand comprise a sequence of 15 contiguous nt from the sequence of a first and/or second strand of: AD-39707.1 (SEQ ID NOs: 154 and 581), or a modified or unmodified variant thereof.

[3203] A RNAi agent comprising a first and a second strand, wherein the sequence of the first and/or second strand comprise a sequence of 15 contiguous nt from the sequence of a first and/or second strand of: AD-39713.1 (SEQ ID NOs: 155 and 582), or a modified or unmodified variant thereof.

[3204] A RNAi agent comprising a first and a second strand, wherein the sequence of the first and/or second strand comprise a sequence of 15 contiguous nt from the sequence of a first and/or second strand of: AD-39719.1 (SEQ ID NOs: 156 and 583), or a modified or unmodified variant thereof.

[3205] A RNAi agent comprising a first and a second strand, wherein the sequence of the first and/or second strand comprise a sequence of 15 contiguous nt from the sequence of a first and/or second strand of: AD-39725.1 (SEQ ID NOs: 157 and 584), or a modified or unmodified variant thereof.

[3206] A RNAi agent comprising a first and a second strand, wherein the sequence of the first and/or second strand comprise a sequence of 15 contiguous nt from the sequence of a first and/or second strand of: AD-39684.1 (SEQ ID NOs: 158 and 585), or a modified or unmodified variant thereof.

[3207] A RNAi agent comprising a first and a second strand, wherein the sequence of the first and/or second strand comprise a sequence of 15 contiguous nt from the sequence of a first and/or second strand of: AD-39690.1 (SEQ ID NOs: 159 and 586), or a modified or unmodified variant thereof.

[3208] A RNAi agent comprising a first and a second strand, wherein the sequence of the first and/or second strand comprise a sequence of 15 contiguous nt from the sequence of a first and/or second strand of: AD-39696.1 (SEQ ID NOs: 160 and 587), or a modified or unmodified variant thereof.

[3209] A RNAi agent comprising a first and a second strand, wherein the sequence of the first and/or second strand comprise a sequence of 15 contiguous nt from the sequence of a first and/or second strand of: AD-39702.1 (SEQ ID NOs: 161 and 588), or a modified or unmodified variant thereof.

[3210] A RNAi agent comprising a first and a second strand, wherein the sequence of the first and/or second strand comprise a sequence of 15 contiguous nt from the sequence of a first and/or second strand of: AD-39708.1 (SEQ ID NOs: 162 and 589), or a modified or unmodified variant thereof.

[3211] A RNAi agent comprising a first and a second strand, wherein the sequence of the first and/or second strand comprise a sequence of 15 contiguous nt from the sequence of a first and/or second strand of: AD-39714.1 (SEQ ID NOs: 163 and 590), or a modified or unmodified variant thereof.

[3212] A RNAi agent comprising a first and a second strand, wherein the sequence of the first and/or second strand comprise a sequence of 15 contiguous nt from the sequence of a first and/or second strand of: AD-39720.1 (SEQ ID NOs: 164 and 591), or a modified or unmodified variant thereof.

[3213] A RNAi agent comprising a first and a second strand, wherein the sequence of the first and/or second strand comprise a sequence of 15 contiguous nt from the sequence of a first and/or second strand of: AD-39726.1 (SEQ ID NOs: 165 and 592), or a modified or unmodified variant thereof.

[3214] A RNAi agent comprising a first and a second strand, wherein the sequence of the first and/or second strand comprise a sequence of 15 contiguous nt from the sequence of a first and/or second strand of: AD-39685.1 (SEQ ID NOs: 166 and 593), or a modified or unmodified variant thereof.

[3215] A RNAi agent comprising a first and a second strand, wherein the sequence of the first and/or second strand comprise a sequence of 15 contiguous nt from the sequence of a first and/or second strand of: AD-39691.1 (SEQ ID NOs: 167 and 594), or a modified or unmodified variant thereof.

[3216] A RNAi agent comprising a first and a second strand, wherein the sequence of the first and/or second strand comprise a sequence of 15 contiguous nt from the sequence of a first and/or second strand of: AD-39697.1 (SEQ ID NOs: 168 and 595), or a modified or unmodified variant thereof.

[3217] A RNAi agent comprising a first and a second strand, wherein the sequence of the first and/or second strand comprise a sequence of 15 contiguous nt from the sequence of a first and/or second strand of: AD-39703.1 (SEQ ID NOs: 169 and 596), or a modified or unmodified variant thereof.

[3218] A RNAi agent comprising a first and a second strand, wherein the sequence of the first and/or second strand comprise a sequence of 15 contiguous nt from the sequence of a first and/or second strand of: AD-39709.1 (SEQ ID NOs: 170 and 597), or a modified or unmodified variant thereof.

[3219] A RNAi agent comprising a first and a second strand, wherein the sequence of the first and/or second strand comprise a sequence of 15 contiguous nt from the sequence of a first and/or second strand of: AD-39715.1 (SEQ ID NOs: 171 and 598), or a modified or unmodified variant thereof.

[3220] A RNAi agent comprising a first and a second strand, wherein the sequence of the first and/or second strand comprise a sequence of 15 contiguous nt from the sequence of a first and/or second strand of: AD-39721.1 (SEQ ID NOs: 172 and 599), or a modified or unmodified variant thereof.

[3221] A RNAi agent comprising a first and a second strand, wherein the sequence of the first and/or second strand comprise a sequence of 15 contiguous nt from the sequence of a first and/or second strand of: AD-39727.1 (SEQ ID NOs: 173 and 600), or a modified or unmodified variant thereof.

[3222] A RNAi agent comprising a first and a second strand, wherein the sequence of the first and/or second strand comprise a sequence of 15 contiguous nt from the sequence of a first and/or second strand of: AD-39686.1 (SEQ ID NOs: 174 and 601), or a modified or unmodified variant thereof.

[3223] A RNAi agent comprising a first and a second strand, wherein the sequence of the first and/or second strand comprise a sequence of 15 contiguous nt from the sequence of a first and/or second strand of: AD-39692.1 (SEQ ID NOs: 175 and 602), or a modified or unmodified variant thereof.

[3224] A RNAi agent comprising a first and a second strand, wherein the sequence of the first and/or second strand comprise a sequence of 15 contiguous nt from the sequence of a first and/or second strand of: AD-39698.1 (SEQ ID NOs: 176 and 603), or a modified or unmodified variant thereof.

[3225] A RNAi agent comprising a first and a second strand, wherein the sequence of the first and/or second strand comprise a sequence of 15 contiguous nt from the sequence of a first and/or second strand of: AD-39704.1 (SEQ ID NOs: 177 and 604), or a modified or unmodified variant thereof.

[3226] A RNAi agent comprising a first and a second strand, wherein the sequence of the first and/or second strand comprise a sequence of 15 contiguous nt from the sequence of a first and/or second strand of: AD-39710.1 (SEQ ID NOs: 178 and 605), or a modified or unmodified variant thereof.

[3227] A RNAi agent comprising a first and a second strand, wherein the sequence of the first and/or second strand comprise a sequence of 15 contiguous nt from the sequence of a first and/or second strand of: AD-39716.1 (SEQ ID NOs: 179 and 606), or a modified or unmodified variant thereof.

[3228] A RNAi agent comprising a first and a second strand, wherein the sequence of the first and/or second strand comprise a sequence of 15 contiguous nt from the sequence of a first and/or second strand of: AD-39722.1 (SEQ ID NOs: 180 and 607), or a modified or unmodified variant thereof.

[3229] A RNAi agent comprising a first and a second strand, wherein the sequence of the first and/or second strand comprise a sequence of 15 contiguous nt from the sequence of a first and/or second strand of: AD-39728.1 (SEQ ID NOs: 181 and 608), or a modified or unmodified variant thereof.

[3230] A RNAi agent comprising a first and a second strand, wherein the sequence of the first and/or second strand comprise a sequence of 15 contiguous nt from the sequence of a first and/or second strand of: AD-39687.1 (SEQ ID NOs: 182 and 609), or a modified or unmodified variant thereof.

[3231] A RNAi agent comprising a first and a second strand, wherein the sequence of the first and/or second strand comprise a sequence of 15 contiguous nt from the sequence of a first and/or second strand of: AD-39693.1 (SEQ ID NOs: 183 and 610), or a modified or unmodified variant thereof.

[3232] A RNAi agent comprising a first and a second strand, wherein the sequence of the first and/or second strand comprise a sequence of 15 contiguous nt from the sequence of a first and/or second strand of: AD-39699.1 (SEQ ID NOs: 184 and 611), or a modified or unmodified variant thereof.

[3233] A RNAi agent comprising a first and a second strand, wherein the sequence of the first and/or second strand comprise a sequence of 15 contiguous nt from the sequence of a first and/or second strand of: AD-39705.1 (SEQ ID NOs: 185 and 612), or a modified or unmodified variant thereof.

[3234] A RNAi agent comprising a first and a second strand, wherein the sequence of the first and/or second strand comprise a sequence of 15 contiguous nt from the sequence of a first and/or second strand of: AD-39711.1 (SEQ ID NOs: 186 and 613), or a modified or unmodified variant thereof.

[3235] A RNAi agent comprising a first and a second strand, wherein the sequence of the first and/or second strand comprise a sequence of 15 contiguous nt from the sequence of a first and/or second strand of: AD-39717.1 (SEQ ID NOs: 187 and 614), or a modified or unmodified variant thereof.

[3236] A RNAi agent comprising a first and a second strand, wherein the sequence of the first and/or second strand comprise a sequence of 15 contiguous nt from the sequence of a first and/or second strand of: AD-39723.1 (SEQ ID NOs: 188 and 615), or a modified or unmodified variant thereof.

[3237] A RNAi agent comprising a first and a second strand, wherein the sequence of the first and/or second strand comprise a sequence of 15 contiguous nt from the sequence of a first and/or second strand of: AD-39729.1 (SEQ ID NOs: 189 and 616), or a modified or unmodified variant thereof.

[3238] A RNAi agent comprising a first and a second strand, wherein the sequence of the first and/or second strand comprise a sequence of 15 contiguous nt from the sequence of a first and/or second strand of: AD-39688.1 (SEQ ID NOs: 190 and 617), or a modified or unmodified variant thereof.

[3239] A RNAi agent comprising a first and a second strand, wherein the sequence of the first and/or second strand comprise a sequence of 15 contiguous nt from the sequence of a first and/or second strand of: AD-39694.1 (SEQ ID NOs: 191 and 618), or a modified or unmodified variant thereof.

[3240] A RNAi agent comprising a first and a second strand, wherein the sequence of the first and/or second strand comprise a sequence of 15 contiguous nt from the sequence of a first and/or second strand of: AD-39700.1 (SEQ ID NOs: 192 and 619), or a modified or unmodified variant thereof. A RNAi agent comprising a first and a second strand, wherein the sequence of the first and/or second strand comprise a sequence of 15 contiguous nt from the sequence of a first and/or second strand of: AD-39706.1 (SEQ ID NOs: 193 and 620), or a modified or unmodified variant thereof.

[3241] A RNAi agent comprising a first and a second strand, wherein the sequence of the first and/or second strand comprise a sequence of 15 contiguous nt from the sequence of a first and/or second strand of: AD-39712.1 (SEQ ID NOs: 194 and 621), or a modified or unmodified variant thereof.

[3242] A RNAi agent comprising a first and a second strand, wherein the sequence of the first and/or second strand comprise a sequence of 15 contiguous nt from the sequence of a first and/or second strand of: AD-39718.1 (SEQ ID NOs: 195 and 622), or a modified or unmodified variant thereof.

[3243] A RNAi agent comprising a first and a second strand, wherein the sequence of the first and/or second strand comprise a sequence of 15 contiguous nt from the sequence of a first and/or second strand of: AD-39724.1 (SEQ ID NOs: 196 and 623), or a modified or unmodified variant thereof.

[3244] A RNAi agent comprising a first and a second strand, wherein the sequence of the first and/or second strand comprise a sequence of 15 contiguous nt from the sequence of a first and/or second strand of: AD-39730.1 (SEQ ID NOs: 197 and 624), or a modified or unmodified variant thereof.

[3245] A RNAi agent comprising a first and a second strand, wherein the sequence of the first and/or second strand comprise a sequence of 15 contiguous nt from the sequence of a first and/or second strand of: AD-39736.1 (SEQ ID NOs: 198 and 625), or a modified or unmodified variant thereof.

[3246] A RNAi agent comprising a first and a second strand, wherein the sequence of the first and/or second strand comprise a sequence of 15 contiguous nt from the sequence of a first and/or second strand of: AD-39742.1 (SEQ ID NOs: 199 and 626), or a modified or unmodified variant thereof.

[3247] A RNAi agent comprising a first and a second strand, wherein the sequence of the first and/or second strand comprise a sequence of 15 contiguous nt from the sequence of a first and/or second strand of: AD-39748.1 (SEQ ID NOs: 200 and 627), or a modified or unmodified variant thereof.

[3248] A RNAi agent comprising a first and a second strand, wherein the sequence of the first and/or second strand comprise a sequence of 15 contiguous nt from the sequence of a first and/or second strand of: AD-39754.1 (SEQ ID NOs: 201 and 628), or a modified or unmodified variant thereof.

[3249] A RNAi agent comprising a first and a second strand, wherein the sequence of the first and/or second strand comprise a sequence of 15 contiguous nt from the sequence of a first and/or second strand of: AD-39760.1 (SEQ ID NOs: 202 and 629), or a modified or unmodified variant thereof.

[3250] A RNAi agent comprising a first and a second strand, wherein the sequence of the first and/or second strand comprise a sequence of 15 contiguous nt from the sequence of a first and/or second strand of: AD-39766.1 (SEQ ID NOs: 203 and 630), or a modified or unmodified variant thereof.

[3251] A RNAi agent comprising a first and a second strand, wherein the sequence of the first and/or second strand comprise a sequence of 15 contiguous nt from the sequence of a first and/or second strand of: AD-39772.1 (SEQ ID NOs: 204 and 631), or a modified or unmodified variant thereof.

[3252] A RNAi agent comprising a first and a second strand, wherein the sequence of the first and/or second strand comprise a sequence of 15 contiguous nt from the sequence of a first and/or second strand of: AD-39731.1 (SEQ ID NOs: 205 and 632), or a modified or unmodified variant thereof.

[3253] A RNAi agent comprising a first and a second strand, wherein the sequence of the first and/or second strand comprise a sequence of 15 contiguous nt from the sequence of a first and/or second strand of: AD-39737.1 (SEQ ID NOs: 206 and 633), or a modified or unmodified variant thereof.

[3254] A RNAi agent comprising a first and a second strand, wherein the sequence of the first and/or second strand comprise a sequence of 15 contiguous nt from the sequence of a first and/or second strand of: AD-39743.1 (SEQ ID NOs: 207 and 634), or a modified or unmodified variant thereof.

[3255] A RNAi agent comprising a first and a second strand, wherein the sequence of the first and/or second strand comprise a sequence of 15 contiguous nt from the sequence of a first and/or second strand of: AD-39749.1 (SEQ ID NOs: 208 and 635), or a modified or unmodified variant thereof.

[3256] A RNAi agent comprising a first and a second strand, wherein the sequence of the first and/or second strand comprise a sequence of 15 contiguous nt from the sequence of a first and/or second strand of: AD-39755.1 (SEQ ID NOs: 209 and 636), or a modified or unmodified variant thereof.

[3257] A RNAi agent comprising a first and a second strand, wherein the sequence of the first and/or second strand comprise a sequence of 15 contiguous nt from the sequence of a first and/or second strand of: AD-39761.1 (SEQ ID NOs: 210 and 637), or a modified or unmodified variant thereof.

[3258] A RNAi agent comprising a first and a second strand, wherein the sequence of the first and/or second strand comprise a sequence of 15 contiguous nt from the sequence of a first and/or second strand of: AD-39767.1 (SEQ ID NOs: 211 and 638), or a modified or unmodified variant thereof.

[3259] A RNAi agent comprising a first and a second strand, wherein the sequence of the first and/or second strand comprise a sequence of 15 contiguous nt from the sequence of a first and/or second strand of: AD-39773.1 (SEQ ID NOs: 212 and 639), or a modified or unmodified variant thereof.

[3260] A RNAi agent comprising a first and a second strand, wherein the sequence of the first and/or second strand comprise a sequence of 15 contiguous nt from the sequence of a first and/or second strand of: AD-39732.1 (SEQ ID NOs: 213 and 640), or a modified or unmodified variant thereof.

[3261] A RNAi agent comprising a first and a second strand, wherein the sequence of the first and/or second strand comprise a sequence of 15 contiguous nt from the sequence of a first and/or second strand of: AD-39738.1 (SEQ ID NOs: 214 and 641), or a modified or unmodified variant thereof.

[3262] A RNAi agent comprising a first and a second strand, wherein the sequence of the first and/or second strand comprise a sequence of 15 contiguous nt from the sequence of a first and/or second strand of: AD-39744.1 (SEQ ID NOs: 215 and 642), or a modified or unmodified variant thereof.

[3263] A RNAi agent comprising a first and a second strand, wherein the sequence of the first and/or second strand comprise a sequence of 15 contiguous nt from the sequence of a first and/or second strand of: AD-39750.1 (SEQ ID NOs: 216 and 643), or a modified or unmodified variant thereof.

[3264] A RNAi agent comprising a first and a second strand, wherein the sequence of the first and/or second strand comprise a sequence of 15 contiguous nt from the sequence of a first and/or second strand of: AD-39756.1 (SEQ ID NOs: 217 and 644), or a modified or unmodified variant thereof.

[3265] A RNAi agent comprising a first and a second strand, wherein the sequence of the first and/or second strand comprise a sequence of 15 contiguous nt from the sequence of a first and/or second strand of: AD-39762.1 (SEQ ID NOs: 218 and 645), or a modified or unmodified variant thereof.

[3266] A RNAi agent comprising a first and a second strand, wherein the sequence of the first and/or second strand comprise a sequence of 15 contiguous nt from the sequence of a first and/or second strand of: AD-39768.1 (SEQ ID NOs: 219 and 646), or a modified or unmodified variant thereof.

[3267] A RNAi agent comprising a first and a second strand, wherein the sequence of the first and/or second strand comprise a sequence of 15 contiguous nt from the sequence of a first and/or second strand of: AD-39774.1 (SEQ ID NOs: 220 and 647), or a modified or unmodified variant thereof.

[3268] A RNAi agent comprising a first and a second strand, wherein the sequence of the first and/or second strand comprise a sequence of 15 contiguous nt from the sequence of a first and/or second strand of: AD-39733.1 (SEQ ID NOs: 221 and 648), or a modified or unmodified variant thereof.

[3269] A RNAi agent comprising a first and a second strand, wherein the sequence of the first and/or second strand comprise a sequence of 15 contiguous nt from the sequence of a first and/or second strand of: AD-39739.1 (SEQ ID NOs: 222 and 649), or a modified or unmodified variant thereof.

[3270] A RNAi agent comprising a first and a second strand, wherein the sequence of the first and/or second strand comprise a sequence of 15 contiguous nt from the sequence of a first and/or second strand of: AD-39745.1 (SEQ ID NOs: 223 and 650), or a modified or unmodified variant thereof.

[3271] A RNAi agent comprising a first and a second strand, wherein the sequence of the first and/or second strand comprise a sequence of 15 contiguous nt from the sequence of a first and/or second strand of: AD-39751.1 (SEQ ID NOs: 224 and 651), or a modified or unmodified variant thereof.

[3272] A RNAi agent comprising a first and a second strand, wherein the sequence of the first and/or second strand comprise a sequence of 15 contiguous nt from the sequence of a first and/or second strand of: AD-39757.1 (SEQ ID NOs: 225 and 652), or a modified or unmodified variant thereof.

[3273] A RNAi agent comprising a first and a second strand, wherein the sequence of the first and/or second strand comprise a sequence of 15 contiguous nt from the sequence of a first and/or second strand of: AD-39763.1 (SEQ ID NOs: 226 and 653), or a modified or unmodified variant thereof.

[3274] A RNAi agent comprising a first and a second strand, wherein the sequence of the first and/or second strand comprise a sequence of 15 contiguous nt from the sequence of a first and/or second strand of: AD-39769.1 (SEQ ID NOs: 227 and 654), or a modified or unmodified variant thereof.

[3275] A RNAi agent comprising a first and a second strand, wherein the sequence of the first and/or second strand comprise a sequence of 15 contiguous nt from the sequence of a first and/or second strand of: AD-39775.1 (SEQ ID NOs: 228 and 655), or a modified or unmodified variant thereof.

[3276] A RNAi agent comprising a first and a second strand, wherein the sequence of the first and/or second strand comprise a sequence of 15 contiguous nt from the sequence of a first and/or second strand of: AD-39734.1 (SEQ ID NOs: 229 and 656), or a modified or unmodified variant thereof.

[3277] A RNAi agent comprising a first and a second strand, wherein the sequence of the first and/or second strand comprise a sequence of 15 contiguous nt from the sequence of a first and/or second strand of: AD-39740.1 (SEQ ID NOs: 230 and 657), or a modified or unmodified variant thereof.

[3278] A RNAi agent comprising a first and a second strand, wherein the sequence of the first and/or second strand comprise a sequence of 15 contiguous nt from the sequence of a first and/or second strand of: AD-39746.1 (SEQ ID NOs: 231 and 658), or a modified or unmodified variant thereof.

[3279] A RNAi agent comprising a first and a second strand, wherein the sequence of the first and/or second strand comprise a sequence of 15 contiguous nt from the sequence of a first and/or second strand of: AD-39752.1 (SEQ ID NOs: 232 and 659), or a modified or unmodified variant thereof. A RNAi agent comprising a first and a second strand, wherein the sequence of the first and/or second strand comprise a sequence of 15 contiguous nt from the sequence of a first and/or second strand of: AD-39758.1 (SEQ ID NOs: 233 and 660), or a modified or unmodified variant thereof.

[3280] A RNAi agent comprising a first and a second strand, wherein the sequence of the first and/or second strand comprise a sequence of 15 contiguous nt from the sequence of a first and/or second strand of: AD-39764.1 (SEQ ID NOs: 234 and 661), or a modified or unmodified variant thereof.

[3281] A RNAi agent comprising a first and a second strand, wherein the sequence of the first and/or second strand comprise a sequence of 15 contiguous nt from the sequence of a first and/or second strand of: AD-39770.1 (SEQ ID NOs: 235 and 662), or a modified or unmodified variant thereof.

[3282] A RNAi agent comprising a first and a second strand, wherein the sequence of the first and/or second strand comprise a sequence of 15 contiguous nt from the sequence of a first and/or second strand of: AD-39776.1 (SEQ ID NOs: 236 and 663), or a modified or unmodified variant thereof.

[3283] A RNAi agent comprising a first and a second strand, wherein the sequence of the first and/or second strand comprise a sequence of 15 contiguous nt from the sequence of a first and/or second strand of: AD-39735.1 (SEQ ID NOs: 237 and 664), or a modified or unmodified variant thereof.

[3284] A RNAi agent comprising a first and a second strand, wherein the sequence of the first and/or second strand comprise a sequence of 15 contiguous nt from the sequence of a first and/or second strand of: AD-39741.1 (SEQ ID NOs: 238 and 665), or a modified or unmodified variant thereof.

[3285] A RNAi agent comprising a first and a second strand, wherein the sequence of the first and/or second strand comprise a sequence of 15 contiguous nt from the sequence of a first and/or second strand of: AD-39747.1 (SEQ ID NOs: 239 and 666), or a modified or unmodified variant thereof.

[3286] A RNAi agent comprising a first and a second strand, wherein the sequence of the first and/or second strand comprise a sequence of 15 contiguous nt from the sequence of a first and/or second strand of: AD-39753.1 (SEQ ID NOs: 240 and 667), or a modified or unmodified variant thereof.

[3287] A RNAi agent comprising a first and a second strand, wherein the sequence of the first and/or second strand comprise a sequence of 15 contiguous nt from the sequence of a first and/or second strand of: AD-39759.1 (SEQ ID NOs: 241 and 668), or a modified or unmodified variant thereof.

[3288] A RNAi agent comprising a first and a second strand, wherein the sequence of the first and/or second strand comprise a sequence of 15 contiguous nt from the sequence of a first and/or second strand of: AD-39765.1 (SEQ ID NOs: 242 and 669), or a modified or unmodified variant thereof.

[3289] A RNAi agent comprising a first and a second strand, wherein the sequence of the first and/or second strand comprise a sequence of 15 contiguous nt from the sequence of a first and/or second strand of: AD-39771.1 (SEQ ID NOs: 243 and 670), or a modified or unmodified variant thereof.

[3290] A RNAi agent comprising a first and a second strand, wherein the sequence of the first and/or second strand comprise a sequence of 15 contiguous nt from the sequence of a first and/or second strand of: AD-39778.1 (SEQ ID NOs: 244 and 671), or a modified or unmodified variant thereof.

[3291] A RNAi agent comprising a first and a second strand, wherein the sequence of the first and/or second strand comprise a sequence of 15 contiguous nt from the sequence of a first and/or second strand of: AD-39784.1 (SEQ ID NOs: 245 and 672), or a modified or unmodified variant thereof.

[3292] A RNAi agent comprising a first and a second strand, wherein the sequence of the first and/or second strand comprise a sequence of 15 contiguous nt from the sequence of a first and/or second strand of: AD-39790.1 (SEQ ID NOs: 246 and 673), or a modified or unmodified variant thereof.

[3293] A RNAi agent comprising a first and a second strand, wherein the sequence of the first and/or second strand comprise a sequence of 15 contiguous nt from the sequence of a first and/or second strand of: AD-39796.1 (SEQ ID NOs: 247 and 674), or a modified or unmodified variant thereof.

[3294] A RNAi agent comprising a first and a second strand, wherein the sequence of the first and/or second strand comprise a sequence of 15 contiguous nt from the sequence of a first and/or second strand of: AD-39802.1 (SEQ ID NOs: 248 and 675), or a modified or unmodified variant thereof.

[3295] A RNAi agent comprising a first and a second strand, wherein the sequence of the first and/or second strand comprise a sequence of 15 contiguous nt from the sequence of a first and/or second strand of: AD-39808.1 (SEQ ID NOs: 249 and 676), or a modified or unmodified variant thereof.

[3296] A RNAi agent comprising a first and a second strand, wherein the sequence of the first and/or second strand comprise a sequence of 15 contiguous nt from the sequence of a first and/or second strand of: AD-39814.1 (SEQ ID NOs: 250 and 677), or a modified or unmodified variant thereof.

[3297] A RNAi agent comprising a first and a second strand, wherein the sequence of the first and/or second strand comprise a sequence of 15 contiguous nt from the sequence of a first and/or second strand of: AD-39820.1 (SEQ ID NOs: 251 and 678), or a modified or unmodified variant thereof.

[3298] A RNAi agent comprising a first and a second strand, wherein the sequence of the first and/or second strand comprise a sequence of 15 contiguous nt from the sequence of a first and/or second strand of: AD-39779.1 (SEQ ID NOs: 252 and 679), or a modified or unmodified variant thereof.

[3299] A RNAi agent comprising a first and a second strand, wherein the sequence of the first and/or second strand comprise a sequence of 15 contiguous nt from the sequence of a first and/or second strand of: AD-39785.1 (SEQ ID NOs: 253 and 680), or a modified or unmodified variant thereof.

[3300] A RNAi agent comprising a first and a second strand, wherein the sequence of the first and/or second strand comprise a sequence of 15 contiguous nt from the sequence of a first and/or second strand of: AD-39791.1 (SEQ ID NOs: 254 and 681), or a modified or unmodified variant thereof.

[3301] A RNAi agent comprising a first and a second strand, wherein the sequence of the first and/or second strand comprise a sequence of 15 contiguous nt from the sequence of a first and/or second strand of: AD-39797.1 (SEQ ID NOs: 255 and 682), or a modified or unmodified variant thereof.

[3302] A RNAi agent comprising a first and a second strand, wherein the sequence of the first and/or second strand comprise a sequence of 15 contiguous nt from the sequence of a first and/or second strand of: AD-39803.1 (SEQ ID NOs: 256 and 683), or a modified or unmodified variant thereof.

[3303] A RNAi agent comprising a first and a second strand, wherein the sequence of the first and/or second strand comprise a sequence of 15 contiguous nt from the sequence of a first and/or second strand of: AD-39809.1 (SEQ ID NOs: 257 and 684), or a modified or unmodified variant thereof.

[3304] A RNAi agent comprising a first and a second strand, wherein the sequence of the first and/or second strand comprise a sequence of 15 contiguous nt from the sequence of a first and/or second strand of: AD-39815.1 (SEQ ID NOs: 258 and 685), or a modified or unmodified variant thereof.

[3305] A RNAi agent comprising a first and a second strand, wherein the sequence of the first and/or second strand comprise a sequence of 15 contiguous nt from the sequence of a first and/or second strand of: AD-39821.1 (SEQ ID NOs: 259 and 686), or a modified or unmodified variant thereof.

[3306] A RNAi agent comprising a first and a second strand, wherein the sequence of the first and/or second strand comprise a sequence of 15 contiguous nt from the sequence of a first and/or second strand of: AD-39780.1 (SEQ ID NOs: 260 and 687), or a modified or unmodified variant thereof.

[3307] A RNAi agent comprising a first and a second strand, wherein the sequence of the first and/or second strand comprise a sequence of 15 contiguous nt from the sequence of a first and/or second strand of: AD-39786.1 (SEQ ID NOs: 261 and 688), or a modified or unmodified variant thereof.

[3308] A RNAi agent comprising a first and a second strand, wherein the sequence of the first and/or second strand comprise a sequence of 15 contiguous nt from the sequence of a first and/or second strand of: AD-39792.1 (SEQ ID NOs: 262 and 689), or a modified or unmodified variant thereof.

[3309] A RNAi agent comprising a first and a second strand, wherein the sequence of the first and/or second strand comprise a sequence of 15 contiguous nt from the sequence of a first and/or second strand of: AD-39798.1 (SEQ ID NOs: 263 and 690), or a modified or unmodified variant thereof.

[3310] A RNAi agent comprising a first and a second strand, wherein the sequence of the first and/or second strand comprise a sequence of 15 contiguous nt from the sequence of a first and/or second strand of: AD-39804.1 (SEQ ID NOs: 264 and 691), or a modified or unmodified variant thereof.

[3311] A RNAi agent comprising a first and a second strand, wherein the sequence of the first and/or second strand comprise a sequence of 15 contiguous nt from the sequence of a first and/or second strand of: AD-39810.1 (SEQ ID NOs: 265 and 692), or a modified or unmodified variant thereof.

[3312] A RNAi agent comprising a first and a second strand, wherein the sequence of the first and/or second strand comprise a sequence of 15 contiguous nt from the sequence of a first and/or second strand of: AD-39816.1 (SEQ ID NOs: 266 and 693), or a modified or unmodified variant thereof.

[3313] A RNAi agent comprising a first and a second strand, wherein the sequence of the first and/or second strand comprise a sequence of 15 contiguous nt from the sequence of a first and/or second strand of: AD-39822.1 (SEQ ID NOs: 267 and 694), or a modified or unmodified variant thereof.

[3314] A RNAi agent comprising a first and a second strand, wherein the sequence of the first and/or second strand comprise a sequence of 15 contiguous nt from the sequence of a first and/or second strand of: AD-39781.1 (SEQ ID NOs: 268 and 695), or a modified or unmodified variant thereof.

[3315] A RNAi agent comprising a first and a second strand, wherein the sequence of the first and/or second strand comprise a sequence of 15 contiguous nt from the sequence of a first and/or second strand of: AD-39787.1 (SEQ ID NOs: 269 and 696), or a modified or unmodified variant thereof.

[3316] A RNAi agent comprising a first and a second strand, wherein the sequence of the first and/or second strand comprise a sequence of 15 contiguous nt from the sequence of a first and/or second strand of: AD-39793.1 (SEQ ID NOs: 270 and 697), or a modified or unmodified variant thereof.

[3317] A RNAi agent comprising a first and a second strand, wherein the sequence of the first and/or second strand comprise a sequence of 15 contiguous nt from the sequence of a first and/or second strand of: AD-39799.1 (SEQ ID NOs: 271 and 698), or a modified or unmodified variant thereof.

[3318] A RNAi agent comprising a first and a second strand, wherein the sequence of the first and/or second strand comprise a sequence of 15 contiguous nt from the sequence of a first and/or second strand of: AD-39805.1 (SEQ ID NOs: 272 and 699), or a modified or unmodified variant thereof. A RNAi agent comprising a first and a second strand, wherein the sequence of the first and/or second strand comprise a sequence of 15 contiguous nt from the sequence of a first and/or second strand of: AD-39811.1 (SEQ ID NOs: 273 and 700), or a modified or unmodified variant thereof.

[3319] A RNAi agent comprising a first and a second strand, wherein the sequence of the first and/or second strand comprise a sequence of 15 contiguous nt from the sequence of a first and/or second strand of: AD-39817.1 (SEQ ID NOs: 274 and 701), or a modified or unmodified variant thereof.

[3320] A RNAi agent comprising a first and a second strand, wherein the sequence of the first and/or second strand comprise a sequence of 15 contiguous nt from the sequence of a first and/or second strand of: AD-39823.1 (SEQ ID NOs: 275 and 702), or a modified or unmodified variant thereof.

[3321] A RNAi agent comprising a first and a second strand, wherein the sequence of the first and/or second strand comprise a sequence of 15 contiguous nt from the sequence of a first and/or second strand of: AD-39782.1 (SEQ ID NOs: 276 and 703), or a modified or unmodified variant thereof.

[3322] A RNAi agent comprising a first and a second strand, wherein the sequence of the first and/or second strand comprise a sequence of 15 contiguous nt from the sequence of a first and/or second strand of: AD-39788.1 (SEQ ID NOs: 277 and 704), or a modified or unmodified variant thereof.

[3323] A RNAi agent comprising a first and a second strand, wherein the sequence of the first and/or second strand comprise a sequence of 15 contiguous nt from the sequence of a first and/or second strand of: AD-39794.1 (SEQ ID NOs: 278 and 705), or a modified or unmodified variant thereof.

[3324] A RNAi agent comprising a first and a second strand, wherein the sequence of the first and/or second strand comprise a sequence of 15 contiguous nt from the sequence of a first and/or second strand of: AD-39800.1 (SEQ ID NOs: 279 and 706), or a modified or unmodified variant thereof.

[3325] A RNAi agent comprising a first and a second strand, wherein the sequence of the first and/or second strand comprise a sequence of 15 contiguous nt from the sequence of a first and/or second strand of: AD-39806.1 (SEQ ID NOs: 280 and 707), or a modified or unmodified variant thereof.

[3326] A RNAi agent comprising a first and a second strand, wherein the sequence of the first and/or second strand comprise a sequence of 15 contiguous nt from the sequence of a first and/or second strand of: AD-39812.1 (SEQ ID NOs: 281 and 708), or a modified or unmodified variant thereof.

[3327] A RNAi agent comprising a first and a second strand, wherein the sequence of the first and/or second strand comprise a sequence of 15 contiguous nt from the sequence of a first and/or second strand of: AD-39818.1 (SEQ ID NOs: 282 and 709), or a modified or unmodified variant thereof.

[3328] A RNAi agent comprising a first and a second strand, wherein the sequence of the first and/or second strand comprise a sequence of 15 contiguous nt from the sequence of a first and/or second strand of: AD-39824.1 (SEQ ID NOs: 283 and 710), or a modified or unmodified variant thereof.

[3329] A RNAi agent comprising a first and a second strand, wherein the sequence of the first and/or second strand comprise a sequence of 15 contiguous nt from the sequence of a first and/or second strand of: AD-39783.1 (SEQ ID NOs: 284 and 711), or a modified or unmodified variant thereof.

[3330] A RNAi agent comprising a first and a second strand, wherein the sequence of the first and/or second strand comprise a sequence of 15 contiguous nt from the sequence of a first and/or second strand of: AD-39789.1 (SEQ ID NOs: 285 and 712), or a modified or unmodified variant thereof.

[3331] A RNAi agent comprising a first and a second strand, wherein the sequence of the first and/or second strand comprise a sequence of 15 contiguous nt from the sequence of a first and/or second strand of: AD-39795.1 (SEQ ID NOs: 286 and 713), or a modified or unmodified variant thereof.

[3332] A RNAi agent comprising a first and a second strand, wherein the sequence of the first and/or second strand comprise a sequence of 15 contiguous nt from the sequence of a first and/or second strand of: AD-39801.1 (SEQ ID NOs: 287 and 714), or a modified or unmodified variant thereof.

[3333] A RNAi agent comprising a first and a second strand, wherein the sequence of the first and/or second strand comprise a sequence of 15 contiguous nt from the sequence of a first and/or second strand of: AD-39807.1 (SEQ ID NOs: 288 and 715), or a modified or unmodified variant thereof.

[3334] A RNAi agent comprising a first and a second strand, wherein the sequence of the first and/or second strand comprise a sequence of 15 contiguous nt from the sequence of a first and/or second strand of: AD-39813.1 (SEQ ID NOs: 289 and 716), or a modified or unmodified variant thereof.

[3335] A RNAi agent comprising a first and a second strand, wherein the sequence of the first and/or second strand comprise a sequence of 15 contiguous nt from the sequence of a first and/or second strand of: AD-39819.1 (SEQ ID NOs: 290 and 717), or a modified or unmodified variant thereof.

[3336] A RNAi agent comprising a first and a second strand, wherein the sequence of the first and/or second strand comprise a sequence of 15 contiguous nt from the sequence of a first and/or second strand of: AD-39825.1 (SEQ ID NOs: 291 and 718), or a modified or unmodified variant thereof.

[3337] A RNAi agent comprising a first and a second strand, wherein the sequence of the first and/or second strand comprise a sequence of 15 contiguous nt from the sequence of a first and/or second strand of: AD-39831.1 (SEQ ID NOs: 292 and 719), or a modified or unmodified variant thereof.

[3338] A RNAi agent comprising a first and a second strand, wherein the sequence of the first and/or second strand comprise a sequence of 15 contiguous nt from the sequence of a first and/or second strand of: AD-39837.1 (SEQ ID NOs: 293 and 720), or a modified or unmodified variant thereof.

[3339] A RNAi agent comprising a first and a second strand, wherein the sequence of the first and/or second strand comprise a sequence of 15 contiguous nt from the sequence of a first and/or second strand of: AD-39843.1 (SEQ ID NOs: 294 and 721), or a modified or unmodified variant thereof.

[3340] A RNAi agent comprising a first and a second strand, wherein the sequence of the first and/or second strand comprise a sequence of 15 contiguous nt from the sequence of a first and/or second strand of: AD-39849.1 (SEQ ID NOs: 295 and 722), or a modified or unmodified variant thereof.

[3341] A RNAi agent comprising a first and a second strand, wherein the sequence of the first and/or second strand comprise a sequence of 15 contiguous nt from the sequence of a first and/or second strand of: AD-39855.1 (SEQ ID NOs: 296 and 723), or a modified or unmodified variant thereof.

[3342] A RNAi agent comprising a first and a second strand, wherein the sequence of the first and/or second strand comprise a sequence of 15 contiguous nt from the sequence of a first and/or second strand of: AD-39861.1 (SEQ ID NOs: 297 and 724), or a modified or unmodified variant thereof.

[3343] A RNAi agent comprising a first and a second strand, wherein the sequence of the first and/or second strand comprise a sequence of 15 contiguous nt from the sequence of a first and/or second strand of: AD-39867.1 (SEQ ID NOs: 298 and 725), or a modified or unmodified variant thereof.

[3344] A RNAi agent comprising a first and a second strand, wherein the sequence of the first and/or second strand comprise a sequence of 15 contiguous nt from the sequence of a first and/or second strand of: AD-39826.1 (SEQ ID NOs: 299 and 726), or a modified or unmodified variant thereof.

[3345] A RNAi agent comprising a first and a second strand, wherein the sequence of the first and/or second strand comprise a sequence of 15 contiguous nt from the sequence of a first and/or second strand of: AD-39832.1 (SEQ ID NOs: 300 and 727), or a modified or unmodified variant thereof.

[3346] A RNAi agent comprising a first and a second strand, wherein the sequence of the first and/or second strand comprise a sequence of 15 contiguous nt from the sequence of a first and/or second strand of: AD-39838.1 (SEQ ID NOs: 301 and 728), or a modified or unmodified variant thereof.

[3347] A RNAi agent comprising a first and a second strand, wherein the sequence of the first and/or second strand comprise a sequence of 15 contiguous nt from the sequence of a first and/or second strand of: AD-39844.1 (SEQ ID NOs: 302 and 729), or a modified or unmodified variant thereof.

[3348] A RNAi agent comprising a first and a second strand, wherein the sequence of the first and/or second strand comprise a sequence of 15 contiguous nt from the sequence of a first and/or second strand of: AD-39850.1 (SEQ ID NOs: 303 and 730), or a modified or unmodified variant thereof.

[3349] A RNAi agent comprising a first and a second strand, wherein the sequence of the first and/or second strand comprise a sequence of 15 contiguous nt from the sequence of a first and/or second strand of: AD-39856.1 (SEQ ID NOs: 304 and 731), or a modified or unmodified variant thereof.

[3350] A RNAi agent comprising a first and a second strand, wherein the sequence of the first and/or second strand comprise a sequence of 15 contiguous nt from the sequence of a first and/or second strand of: AD-39862.1 (SEQ ID NOs: 305 and 732), or a modified or unmodified variant thereof.

[3351] A RNAi agent comprising a first and a second strand, wherein the sequence of the first and/or second strand comprise a sequence of 15 contiguous nt from the sequence of a first and/or second strand of: AD-39868.1 (SEQ ID NOs: 306 and 733), or a modified or unmodified variant thereof.

[3352] A RNAi agent comprising a first and a second strand, wherein the sequence of the first and/or second strand comprise a sequence of 15 contiguous nt from the sequence of a first and/or second strand of: AD-39827.1 (SEQ ID NOs: 307 and 734), or a modified or unmodified variant thereof.

[3353] A RNAi agent comprising a first and a second strand, wherein the sequence of the first and/or second strand comprise a sequence of 15 contiguous nt from the sequence of a first and/or second strand of: AD-39833.1 (SEQ ID NOs: 308 and 735), or a modified or unmodified variant thereof.

[3354] A RNAi agent comprising a first and a second strand, wherein the sequence of the first and/or second strand comprise a sequence of 15 contiguous nt from the sequence of a first and/or second strand of: AD-39839.1 (SEQ ID NOs: 309 and 736), or a modified or unmodified variant thereof.

[3355] A RNAi agent comprising a first and a second strand, wherein the sequence of the first and/or second strand comprise a sequence of 15 contiguous nt from the sequence of a first and/or second strand of: AD-39845.1 (SEQ ID NOs: 310 and 737), or a modified or unmodified variant thereof.

[3356] A RNAi agent comprising a first and a second strand, wherein the sequence of the first and/or second strand comprise a sequence of 15 contiguous nt from the sequence of a first and/or second strand of: AD-39851.1 (SEQ ID NOs: 311 and 738), or a modified or unmodified variant thereof.

[3357] A RNAi agent comprising a first and a second strand, wherein the sequence of the first and/or second strand comprise a sequence of 15 contiguous nt from the sequence of a first and/or second strand of: AD-39857.1 (SEQ ID NOs: 312 and 739), or a modified or unmodified variant thereof. A RNAi agent comprising a first and a second strand, wherein the sequence of the first and/or second strand comprise a sequence of 15 contiguous nt from the sequence of a first and/or second strand of: AD-39863.1 (SEQ ID NOs: 313 and 740), or a modified or unmodified variant thereof.

[3358] A RNAi agent comprising a first and a second strand, wherein the sequence of the first and/or second strand comprise a sequence of 15 contiguous nt from the sequence of a first and/or second strand of: AD-39869.1 (SEQ ID NOs: 314 and 741), or a modified or unmodified variant thereof.

[3359] A RNAi agent comprising a first and a second strand, wherein the sequence of the first and/or second strand comprise a sequence of 15 contiguous nt from the sequence of a first and/or second strand of: AD-39828.1 (SEQ ID NOs: 315 and 742), or a modified or unmodified variant thereof.

[3360] A RNAi agent comprising a first and a second strand, wherein the sequence of the first and/or second strand comprise a sequence of 15 contiguous nt from the sequence of a first and/or second strand of: AD-39834.1 (SEQ ID NOs: 316 and 743), or a modified or unmodified variant thereof.

[3361] A RNAi agent comprising a first and a second strand, wherein the sequence of the first and/or second strand comprise a sequence of 15 contiguous nt from the sequence of a first and/or second strand of: AD-39840.1 (SEQ ID NOs: 317 and 744), or a modified or unmodified variant thereof.

[3362] A RNAi agent comprising a first and a second strand, wherein the sequence of the first and/or second strand comprise a sequence of 15 contiguous nt from the sequence of a first and/or second strand of: AD-39846.1 (SEQ ID NOs: 318 and 745), or a modified or unmodified variant thereof.

[3363] A RNAi agent comprising a first and a second strand, wherein the sequence of the first and/or second strand comprise a sequence of 15 contiguous nt from the sequence of a first and/or second strand of: AD-39852.1 (SEQ ID NOs: 319 and 746), or a modified or unmodified variant thereof.

[3364] A RNAi agent comprising a first and a second strand, wherein the sequence of the first and/or second strand comprise a sequence of 15 contiguous nt from the sequence of a first and/or second strand of: AD-39858.1 (SEQ ID NOs: 320 and 747), or a modified or unmodified variant thereof.

[3365] A RNAi agent comprising a first and a second strand, wherein the sequence of the first and/or second strand comprise a sequence of 15 contiguous nt from the sequence of a first and/or second strand of: AD-39864.1 (SEQ ID NOs: 321 and 748), or a modified or unmodified variant thereof.

[3366] A RNAi agent comprising a first and a second strand, wherein the sequence of the first and/or second strand comprise a sequence of 15 contiguous nt from the sequence of a first and/or second strand of: AD-39870.1 (SEQ ID NOs: 322 and 749), or a modified or unmodified variant thereof.

[3367] A RNAi agent comprising a first and a second strand, wherein the sequence of the first and/or second strand comprise a sequence of 15 contiguous nt from the sequence of a first and/or second strand of: AD-39829.1 (SEQ ID NOs: 323 and 750), or a modified or unmodified variant thereof.

[3368] A RNAi agent comprising a first and a second strand, wherein the sequence of the first and/or second strand comprise a sequence of 15 contiguous nt from the sequence of a first and/or second strand of: AD-39835.1 (SEQ ID NOs: 324 and 751), or a modified or unmodified variant thereof.

[3369] A RNAi agent comprising a first and a second strand, wherein the sequence of the first and/or second strand comprise a sequence of 15 contiguous nt from the sequence of a first and/or second strand of: AD-39841.1 (SEQ ID NOs: 325 and 752), or a modified or unmodified variant thereof.

[3370] A RNAi agent comprising a first and a second strand, wherein the sequence of the first and/or second strand comprise a sequence of 15 contiguous nt from the sequence of a first and/or second strand of: AD-39853.1 (SEQ ID NOs: 326 and 753), or a modified or unmodified variant thereof.

[3371] A RNAi agent comprising a first and a second strand, wherein the sequence of the first and/or second strand comprise a sequence of 15 contiguous nt from the sequence of a first and/or second strand of: AD-39859.1 (SEQ ID NOs: 327 and 754), or a modified or unmodified variant thereof.

[3372] A RNAi agent comprising a first and a second strand, wherein the sequence of the first and/or second strand comprise a sequence of 15 contiguous nt from the sequence of a first and/or second strand of: AD-39865.1 (SEQ ID NOs: 328 and 755), or a modified or unmodified variant thereof.

[3373] A RNAi agent comprising a first and a second strand, wherein the sequence of the first and/or second strand comprise a sequence of 15 contiguous nt from the sequence of a first and/or second strand of: AD-39871.1 (SEQ ID NOs: 329 and 756), or a modified or unmodified variant thereof.

[3374] A RNAi agent comprising a first and a second strand, wherein the sequence of the first and/or second strand comprise a sequence of 15 contiguous nt from the sequence of a first and/or second strand of: AD-39830.1 (SEQ ID NOs: 330 and 757), or a modified or unmodified variant thereof.

[3375] A RNAi agent comprising a first and a second strand, wherein the sequence of the first and/or second strand comprise a sequence of 15 contiguous nt from the sequence of a first and/or second strand of: AD-39836.1 (SEQ ID NOs: 331 and 758), or a modified or unmodified variant thereof.

[3376] A RNAi agent comprising a first and a second strand, wherein the sequence of the first and/or second strand comprise a sequence of 15 contiguous nt from the sequence of a first and/or second strand of: AD-39842.1 (SEQ ID NOs: 332 and 759), or a modified or unmodified variant thereof.

[3377] A RNAi agent comprising a first and a second strand, wherein the sequence of the first and/or second strand comprise a sequence of 15 contiguous nt from the sequence of a first and/or second strand of: AD-39848.1 (SEQ ID NOs: 333 and 760), or a modified or unmodified variant thereof.

[3378] A RNAi agent comprising a first and a second strand, wherein the sequence of the first and/or second strand comprise a sequence of 15 contiguous nt from the sequence of a first and/or second strand of: AD-39854.1 (SEQ ID NOs: 334 and 761), or a modified or unmodified variant thereof.

[3379] A RNAi agent comprising a first and a second strand, wherein the sequence of the first and/or second strand comprise a sequence of 15 contiguous nt from the sequence of a first and/or second strand of: AD-39860.1 (SEQ ID NOs: 335 and 762), or a modified or unmodified variant thereof.

[3380] A RNAi agent comprising a first and a second strand, wherein the sequence of the first and/or second strand comprise a sequence of 15 contiguous nt from the sequence of a first and/or second strand of: AD-39866.1 (SEQ ID NOs: 336 and 763), or a modified or unmodified variant thereof.

[3381] A RNAi agent comprising a first and a second strand, wherein the sequence of the first and/or second strand comprise a sequence of 15 contiguous nt from the sequence of a first and/or second strand of: AD-39992.1 (SEQ ID NOs: 337 and 764), or a modified or unmodified variant thereof.

[3382] A RNAi agent comprising a first and a second strand, wherein the sequence of the first and/or second strand comprise a sequence of 15 contiguous nt from the sequence of a first and/or second strand of: AD-39998.1 (SEQ ID NOs: 338 and 765), or a modified or unmodified variant thereof.

[3383] A RNAi agent comprising a first and a second strand, wherein the sequence of the first and/or second strand comprise a sequence of 15 contiguous nt from the sequence of a first and/or second strand of: AD-40004.1 (SEQ ID NOs: 339 and 766), or a modified or unmodified variant thereof.

[3384] A RNAi agent comprising a first and a second strand, wherein the sequence of the first and/or second strand comprise a sequence of 15 contiguous nt from the sequence of a first and/or second strand of: AD-40010.1 (SEQ ID NOs: 340 and 767), or a modified or unmodified variant thereof.

[3385] A RNAi agent comprising a first and a second strand, wherein the sequence of the first and/or second strand comprise a sequence of 15 contiguous nt from the sequence of a first and/or second strand of: AD-40016.1 (SEQ ID NOs: 341 and 768), or a modified or unmodified variant thereof.

[3386] A RNAi agent comprising a first and a second strand, wherein the sequence of the first and/or second strand comprise a sequence of 15 contiguous nt from the sequence of a first and/or second strand of: AD-40022.1 (SEQ ID NOs: 342 and 769), or a modified or unmodified variant thereof.

[3387] A RNAi agent comprising a first and a second strand, wherein the sequence of the first and/or second strand comprise a sequence of 15 contiguous nt from the sequence of a first and/or second strand of: AD-40028.1 (SEQ ID NOs: 343 and 770), or a modified or unmodified variant thereof.

[3388] A RNAi agent comprising a first and a second strand, wherein the sequence of the first and/or second strand comprise a sequence of 15 contiguous nt from the sequence of a first and/or second strand of: AD-40034.1 (SEQ ID NOs: 344 and 771), or a modified or unmodified variant thereof.

[3389] A RNAi agent comprising a first and a second strand, wherein the sequence of the first and/or second strand comprise a sequence of 15 contiguous nt from the sequence of a first and/or second strand of: AD-39999.1 (SEQ ID NOs: 345 and 772), or a modified or unmodified variant thereof.

[3390] A RNAi agent comprising a first and a second strand, wherein the sequence of the first and/or second strand comprise a sequence of 15 contiguous nt from the sequence of a first and/or second strand of: AD-40005.1 (SEQ ID NOs: 346 and 773), or a modified or unmodified variant thereof.

[3391] A RNAi agent comprising a first and a second strand, wherein the sequence of the first and/or second strand comprise a sequence of 15 contiguous nt from the sequence of a first and/or second strand of: AD-40011.1 (SEQ ID NOs: 347 and 774), or a modified or unmodified variant thereof.

[3392] A RNAi agent comprising a first and a second strand, wherein the sequence of the first and/or second strand comprise a sequence of 15 contiguous nt from the sequence of a first and/or second strand of: AD-40017.1 (SEQ ID NOs: 348 and 775), or a modified or unmodified variant thereof.

[3393] A RNAi agent comprising a first and a second strand, wherein the sequence of the first and/or second strand comprise a sequence of 15 contiguous nt from the sequence of a first and/or second strand of: AD-40029.1 (SEQ ID NOs: 349 and 776), or a modified or unmodified variant thereof.

[3394] A RNAi agent comprising a first and a second strand, wherein the sequence of the first and/or second strand comprise a sequence of 15 contiguous nt from the sequence of a first and/or second strand of: AD-40035.1 (SEQ ID NOs: 350 and 777), or a modified or unmodified variant thereof.

[3395] A RNAi agent comprising a first and a second strand, wherein the sequence of the first and/or second strand comprise a sequence of 15 contiguous nt from the sequence of a first and/or second strand of: AD-39994.1 (SEQ ID NOs: 351 and 778), or a modified or unmodified variant thereof.

[3396] A RNAi agent comprising a first and a second strand, wherein the sequence of the first and/or second strand comprise a sequence of 15 contiguous nt from the sequence of a first and/or second strand of: AD-40000.1 (SEQ ID NOs: 352 and 779), or a modified or unmodified variant thereof. A RNAi agent comprising a first and a second strand, wherein the sequence of the first and/or second strand comprise a sequence of 15 contiguous nt from the sequence of a first and/or second strand of: AD-40006.1 (SEQ ID NOs: 353 and 780), or a modified or unmodified variant thereof.

[3397] A RNAi agent comprising a first and a second strand, wherein the sequence of the first and/or second strand comprise a sequence of 15 contiguous nt from the sequence of a first and/or second strand of: AD-40012.1 (SEQ ID NOs: 354 and 781), or a modified or unmodified variant thereof.

[3398] A RNAi agent comprising a first and a second strand, wherein the sequence of the first and/or second strand comprise a sequence of 15 contiguous nt from the sequence of a first and/or second strand of: AD-40018.1 (SEQ ID NOs: 355 and 782), or a modified or unmodified variant thereof.

[3399] A RNAi agent comprising a first and a second strand, wherein the sequence of the first and/or second strand comprise a sequence of 15 contiguous nt from the sequence of a first and/or second strand of: AD-40024.1 (SEQ ID NOs: 356 and 783), or a modified or unmodified variant thereof.

[3400] A RNAi agent comprising a first and a second strand, wherein the sequence of the first and/or second strand comprise a sequence of 15 contiguous nt from the sequence of a first and/or second strand of: AD-40030.1 (SEQ ID NOs: 357 and 784), or a modified or unmodified variant thereof.

[3401] A RNAi agent comprising a first and a second strand, wherein the sequence of the first and/or second strand comprise a sequence of 15 contiguous nt from the sequence of a first and/or second strand of: AD-40036.1 (SEQ ID NOs: 358 and 785), or a modified or unmodified variant thereof.

[3402] A RNAi agent comprising a first and a second strand, wherein the sequence of the first and/or second strand comprise a sequence of 15 contiguous nt from the sequence of a first and/or second strand of: AD-39995.1 (SEQ ID NOs: 359 and 786), or a modified or unmodified variant thereof.

[3403] A RNAi agent comprising a first and a second strand, wherein the sequence of the first and/or second strand comprise a sequence of 15 contiguous nt from the sequence of a first and/or second strand of: AD-40001.1 (SEQ ID NOs: 360 and 787), or a modified or unmodified variant thereof.

[3404] A RNAi agent comprising a first and a second strand, wherein the sequence of the first and/or second strand comprise a sequence of 15 contiguous nt from the sequence of a first and/or second strand of: AD-40007.1 (SEQ ID NOs: 361 and 788), or a modified or unmodified variant thereof.

[3405] A RNAi agent comprising a first and a second strand, wherein the sequence of the first and/or second strand comprise a sequence of 15 contiguous nt from the sequence of a first and/or second strand of: AD-40013.1 (SEQ ID NOs: 362 and 789), or a modified or unmodified variant thereof.

[3406] A RNAi agent comprising a first and a second strand, wherein the sequence of the first and/or second strand comprise a sequence of 15 contiguous nt from the sequence of a first and/or second strand of: AD-40019.1 (SEQ ID NOs: 363 and 790), or a modified or unmodified variant thereof.

[3407] A RNAi agent comprising a first and a second strand, wherein the sequence of the first and/or second strand comprise a sequence of 15 contiguous nt from the sequence of a first and/or second strand of: AD-40025.1 (SEQ ID NOs: 364 and 791), or a modified or unmodified variant thereof.

[3408] A RNAi agent comprising a first and a second strand, wherein the sequence of the first and/or second strand comprise a sequence of 15 contiguous nt from the sequence of a first and/or second strand of: AD-40031.1 (SEQ ID NOs: 365 and 792), or a modified or unmodified variant thereof.

[3409] A RNAi agent comprising a first and a second strand, wherein the sequence of the first and/or second strand comprise a sequence of 15 contiguous nt from the sequence of a first and/or second strand of: AD-40037.1 (SEQ ID NOs: 366 and 793), or a modified or unmodified variant thereof.

[3410] A RNAi agent comprising a first and a second strand, wherein the sequence of the first and/or second strand comprise a sequence of 15 contiguous nt from the sequence of a first and/or second strand of: AD-39996.1 (SEQ ID NOs: 367 and 794), or a modified or unmodified variant thereof.

[3411] A RNAi agent comprising a first and a second strand, wherein the sequence of the first and/or second strand comprise a sequence of 15 contiguous nt from the sequence of a first and/or second strand of: AD-40002.1 (SEQ ID NOs: 368 and 795), or a modified or unmodified variant thereof.

[3412] A RNAi agent comprising a first and a second strand, wherein the sequence of the first and/or second strand comprise a sequence of 15 contiguous nt from the sequence of a first and/or second strand of: AD-40008.1 (SEQ ID NOs: 369 and 796), or a modified or unmodified variant thereof.

[3413] A RNAi agent comprising a first and a second strand, wherein the sequence of the first and/or second strand comprise a sequence of 15 contiguous nt from the sequence of a first and/or second strand of: AD-40014.1 (SEQ ID NOs: 370 and 797), or a modified or unmodified variant thereof.

[3414] A RNAi agent comprising a first and a second strand, wherein the sequence of the first and/or second strand comprise a sequence of 15 contiguous nt from the sequence of a first and/or second strand of: AD-40020.1 (SEQ ID NOs: 371 and 798), or a modified or unmodified variant thereof.

[3415] A RNAi agent comprising a first and a second strand, wherein the sequence of the first and/or second strand comprise a sequence of 15 contiguous nt from the sequence of a first and/or second strand of: AD-40026.1 (SEQ ID NOs: 372 and 799), or a modified or unmodified variant thereof.

[3416] A RNAi agent comprising a first and a second strand, wherein the sequence of the first and/or second strand comprise a sequence of 15 contiguous nt from the sequence of a first and/or second strand of: AD-40032.1 (SEQ ID NOs: 373 and 800), or a modified or unmodified variant thereof.

[3417] A RNAi agent comprising a first and a second strand, wherein the sequence of the first and/or second strand comprise a sequence of 15 contiguous nt from the sequence of a first and/or second strand of: AD-40038.1 (SEQ ID NOs: 374 and 801), or a modified or unmodified variant thereof.

[3418] A RNAi agent comprising a first and a second strand, wherein the sequence of the first and/or second strand comprise a sequence of 15 contiguous nt from the sequence of a first and/or second strand of: AD-39997.1 (SEQ ID NOs: 375 and 802), or a modified or unmodified variant thereof.

[3419] A RNAi agent comprising a first and a second strand, wherein the sequence of the first and/or second strand comprise a sequence of 15 contiguous nt from the sequence of a first and/or second strand of: AD-40009.1 (SEQ ID NOs: 376 and 803), or a modified or unmodified variant thereof.

[3420] A RNAi agent comprising a first and a second strand, wherein the sequence of the first and/or second strand comprise a sequence of 15 contiguous nt from the sequence of a first and/or second strand of: AD-40015.1 (SEQ ID NOs: 377 and 804), or a modified or unmodified variant thereof.

[3421] A RNAi agent comprising a first and a second strand, wherein the sequence of the first and/or second strand comprise a sequence of 15 contiguous nt from the sequence of a first and/or second strand of: AD-40021.1 (SEQ ID NOs: 378 and 805), or a modified or unmodified variant thereof.

[3422] A RNAi agent comprising a first and a second strand, wherein the sequence of the first and/or second strand comprise a sequence of 15 contiguous nt from the sequence of a first and/or second strand of: AD-40027.1 (SEQ ID NOs: 379 and 806), or a modified or unmodified variant thereof.

[3423] A RNAi agent comprising a first and a second strand, wherein the sequence of the first and/or second strand comprise a sequence of 15 contiguous nt from the sequence of a first and/or second strand of: AD-40033.1 (SEQ ID NOs: 380 and 807), or a modified or unmodified variant thereof.

[3424] A RNAi agent comprising a first and a second strand, wherein the sequence of the first and/or second strand comprise a sequence of 15 contiguous nt from the sequence of a first and/or second strand of: AD-40039.1 (SEQ ID NOs: 381 and 808), or a modified or unmodified variant thereof.

[3425] A RNAi agent comprising a first and a second strand, wherein the sequence of the first and/or second strand comprise a sequence of 15 contiguous nt from the sequence of a first and/or second strand of: AD-40045.1 (SEQ ID NOs: 382 and 809), or a modified or unmodified variant thereof.

[3426] A RNAi agent comprising a first and a second strand, wherein the sequence of the first and/or second strand comprise a sequence of 15 contiguous nt from the sequence of a first and/or second strand of: AD-40051.1 (SEQ ID NOs: 383 and 810), or a modified or unmodified variant thereof.

[3427] A RNAi agent comprising a first and a second strand, wherein the sequence of the first and/or second strand comprise a sequence of 15 contiguous nt from the sequence of a first and/or second strand of: AD-40057.1 (SEQ ID NOs: 384 and 811), or a modified or unmodified variant thereof.

[3428] A RNAi agent comprising a first and a second strand, wherein the sequence of the first and/or second strand comprise a sequence of 15 contiguous nt from the sequence of a first and/or second strand of: AD-40063.1 (SEQ ID NOs: 385 and 812), or a modified or unmodified variant thereof.

[3429] A RNAi agent comprising a first and a second strand, wherein the sequence of the first and/or second strand comprise a sequence of 15 contiguous nt from the sequence of a first and/or second strand of: AD-40069.1 (SEQ ID NOs: 386 and 813), or a modified or unmodified variant thereof.

[3430] A RNAi agent comprising a first and a second strand, wherein the sequence of the first and/or second strand comprise a sequence of 15 contiguous nt from the sequence of a first and/or second strand of: AD-40075.1 (SEQ ID NOs: 387 and 814), or a modified or unmodified variant thereof.

[3431] A RNAi agent comprising a first and a second strand, wherein the sequence of the first and/or second strand comprise a sequence of 15 contiguous nt from the sequence of a first and/or second strand of: AD-40081.1 (SEQ ID NOs: 388 and 815), or a modified or unmodified variant thereof.

[3432] A RNAi agent comprising a first and a second strand, wherein the sequence of the first and/or second strand comprise a sequence of 15 contiguous nt from the sequence of a first and/or second strand of: AD-40040.1 (SEQ ID NOs: 389 and 816), or a modified or unmodified variant thereof.

[3433] A RNAi agent comprising a first and a second strand, wherein the sequence of the first and/or second strand comprise a sequence of 15 contiguous nt from the sequence of a first and/or second strand of: AD-40046.1 (SEQ ID NOs: 390 and 817), or a modified or unmodified variant thereof.

[3434] A RNAi agent comprising a first and a second strand, wherein the sequence of the first and/or second strand comprise a sequence of 15 contiguous nt from the sequence of a first and/or second strand of: AD-40052.1 (SEQ ID NOs: 391 and 818), or a modified or unmodified variant thereof.

[3435] A RNAi agent comprising a first and a second strand, wherein the sequence of the first and/or second strand comprise a sequence of 15 contiguous nt from the sequence of a first and/or second strand of: AD-40058.1 (SEQ ID NOs: 392 and 819), or a modified or unmodified variant thereof. A RNAi agent comprising a first and a second strand, wherein the sequence of the first and/or second strand comprise a sequence of 15 contiguous nt from the sequence of a first and/or second strand of: AD-40064.1 (SEQ ID NOs: 393 and 820), or a modified or unmodified variant thereof.

[3436] A RNAi agent comprising a first and a second strand, wherein the sequence of the first and/or second strand comprise a sequence of 15 contiguous nt from the sequence of a first and/or second strand of: AD-40070.1 (SEQ ID NOs: 394 and 821), or a modified or unmodified variant thereof.

[3437] A RNAi agent comprising a first and a second strand, wherein the sequence of the first and/or second strand comprise a sequence of 15 contiguous nt from the sequence of a first and/or second strand of: AD-40076.1 (SEQ ID NOs: 395 and 822), or a modified or unmodified variant thereof.

[3438] A RNAi agent comprising a first and a second strand, wherein the sequence of the first and/or second strand comprise a sequence of 15 contiguous nt from the sequence of a first and/or second strand of: AD-40082.1 (SEQ ID NOs: 396 and 823), or a modified or unmodified variant thereof.

[3439] A RNAi agent comprising a first and a second strand, wherein the sequence of the first and/or second strand comprise a sequence of 15 contiguous nt from the sequence of a first and/or second strand of: AD-40041.1 (SEQ ID NOs: 397 and 824), or a modified or unmodified variant thereof.

[3440] A RNAi agent comprising a first and a second strand, wherein the sequence of the first and/or second strand comprise a sequence of 15 contiguous nt from the sequence of a first and/or second strand of: AD-40047.1 (SEQ ID NOs: 398 and 825), or a modified or unmodified variant thereof.

[3441] A RNAi agent comprising a first and a second strand, wherein the sequence of the first and/or second strand comprise a sequence of 15 contiguous nt from the sequence of a first and/or second strand of: AD-40053.1 (SEQ ID NOs: 399 and 826), or a modified or unmodified variant thereof.

[3442] A RNAi agent comprising a first and a second strand, wherein the sequence of the first and/or second strand comprise a sequence of 15 contiguous nt from the sequence of a first and/or second strand of: AD-40059.1 (SEQ ID NOs: 400 and 827), or a modified or unmodified variant thereof.

[3443] A RNAi agent comprising a first and a second strand, wherein the sequence of the first and/or second strand comprise a sequence of 15 contiguous nt from the sequence of a first and/or second strand of: AD-40065.1 (SEQ ID NOs: 401 and 828), or a modified or unmodified variant thereof.

[3444] A RNAi agent comprising a first and a second strand, wherein the sequence of the first and/or second strand comprise a sequence of 15 contiguous nt from the sequence of a first and/or second strand of: AD-40071.1 (SEQ ID NOs: 402 and 829), or a modified or unmodified variant thereof.

[3445] A RNAi agent comprising a first and a second strand, wherein the sequence of the first and/or second strand comprise a sequence of 15 contiguous nt from the sequence of a first and/or second strand of: AD-40077.1 (SEQ ID NOs: 403 and 830), or a modified or unmodified variant thereof.

[3446] A RNAi agent comprising a first and a second strand, wherein the sequence of the first and/or second strand comprise a sequence of 15 contiguous nt from the sequence of a first and/or second strand of: AD-40083.1 (SEQ ID NOs: 404 and 831), or a modified or unmodified variant thereof.

[3447] A RNAi agent comprising a first and a second strand, wherein the sequence of the first and/or second strand comprise a sequence of 15 contiguous nt from the sequence of a first and/or second strand of: AD-40042.1 (SEQ ID NOs: 405 and 832), or a modified or unmodified variant thereof.

[3448] A RNAi agent comprising a first and a second strand, wherein the sequence of the first and/or second strand comprise a sequence of 15 contiguous nt from the sequence of a first and/or second strand of: AD-40048.1 (SEQ ID NOs: 406 and 833), or a modified or unmodified variant thereof.

[3449] A RNAi agent comprising a first and a second strand, wherein the sequence of the first and/or second strand comprise a sequence of 15 contiguous nt from the sequence of a first and/or second strand of: AD-40054.1 (SEQ ID NOs: 407 and 834), or a modified or unmodified variant thereof.

[3450] A RNAi agent comprising a first and a second strand, wherein the sequence of the first and/or second strand comprise a sequence of 15 contiguous nt from the sequence of a first and/or second strand of: AD-40060.1 (SEQ ID NOs: 408 and 835), or a modified or unmodified variant thereof.

[3451] A RNAi agent comprising a first and a second strand, wherein the sequence of the first and/or second strand comprise a sequence of 15 contiguous nt from the sequence of a first and/or second strand of: AD-40066.1 (SEQ ID NOs: 409 and 836), or a modified or unmodified variant thereof.

[3452] A RNAi agent comprising a first and a second strand, wherein the sequence of the first and/or second strand comprise a sequence of 15 contiguous nt from the sequence of a first and/or second strand of: AD-40072.1 (SEQ ID NOs: 410 and 837), or a modified or unmodified variant thereof.

[3453] A RNAi agent comprising a first and a second strand, wherein the sequence of the first and/or second strand comprise a sequence of 15 contiguous nt from the sequence of a first and/or second strand of: AD-40078.1 (SEQ ID NOs: 411 and 838), or a modified or unmodified variant thereof.

[3454] A RNAi agent comprising a first and a second strand, wherein the sequence of the first and/or second strand comprise a sequence of 15 contiguous nt from the sequence of a first and/or second strand of: AD-40084.1 (SEQ ID NOs: 412 and 839), or a modified or unmodified variant thereof.

[3455] A RNAi agent comprising a first and a second strand, wherein the sequence of the first and/or second strand comprise a sequence of 15 contiguous nt from the sequence of a first and/or second strand of: AD-40043.1 (SEQ ID NOs: 413 and 840), or a modified or unmodified variant thereof.

[3456] A RNAi agent comprising a first and a second strand, wherein the sequence of the first and/or second strand comprise a sequence of 15 contiguous nt from the sequence of a first and/or second strand of: AD-40049.1 (SEQ ID NOs: 414 and 841), or a modified or unmodified variant thereof.

[3457] A RNAi agent comprising a first and a second strand, wherein the sequence of the first and/or second strand comprise a sequence of 15 contiguous nt from the sequence of a first and/or second strand of: AD-40055.1 (SEQ ID NOs: 415 and 842), or a modified or unmodified variant thereof.

[3458] A RNAi agent comprising a first and a second strand, wherein the sequence of the first and/or second strand comprise a sequence of 15 contiguous nt from the sequence of a first and/or second strand of: AD-40061.1 (SEQ ID NOs: 416 and 843), or a modified or unmodified variant thereof.

[3459] A RNAi agent comprising a first and a second strand, wherein the sequence of the first and/or second strand comprise a sequence of 15 contiguous nt from the sequence of a first and/or second strand of: AD-40067.1 (SEQ ID NOs: 417 and 844), or a modified or unmodified variant thereof.

[3460] A RNAi agent comprising a first and a second strand, wherein the sequence of the first and/or second strand comprise a sequence of 15 contiguous nt from the sequence of a first and/or second strand of: AD-40073.1 (SEQ ID NOs: 418 and 845), or a modified or unmodified variant thereof.

[3461] A RNAi agent comprising a first and a second strand, wherein the sequence of the first and/or second strand comprise a sequence of 15 contiguous nt from the sequence of a first and/or second strand of: AD-40079.1 (SEQ ID NOs: 419 and 846), or a modified or unmodified variant thereof.

[3462] A RNAi agent comprising a first and a second strand, wherein the sequence of the first and/or second strand comprise a sequence of 15 contiguous nt from the sequence of a first and/or second strand of: AD-40085.1 (SEQ ID NOs: 420 and 847), or a modified or unmodified variant thereof.

[3463] A RNAi agent comprising a first and a second strand, wherein the sequence of the first and/or second strand comprise a sequence of 15 contiguous nt from the sequence of a first and/or second strand of: AD-40044.1 (SEQ ID NOs: 421 and 848), or a modified or unmodified variant thereof.

[3464] A RNAi agent comprising a first and a second strand, wherein the sequence of the first and/or second strand comprise a sequence of 15 contiguous nt from the sequence of a first and/or second strand of: AD-40050.1 (SEQ ID NOs: 422 and 849), or a modified or unmodified variant thereof.

[3465] A RNAi agent comprising a first and a second strand, wherein the sequence of the first and/or second strand comprise a sequence of 15 contiguous nt from the sequence of a first and/or second strand of: AD-40056.1 (SEQ ID NOs: 423 and 850), or a modified or unmodified variant thereof.

[3466] A RNAi agent comprising a first and a second strand, wherein the sequence of the first and/or second strand comprise a sequence of 15 contiguous nt from the sequence of a first and/or second strand of: AD-40062.1 (SEQ ID NOs: 424 and 851), or a modified or unmodified variant thereof.

[3467] A RNAi agent comprising a first and a second strand, wherein the sequence of the first and/or second strand comprise a sequence of 15 contiguous nt from the sequence of a first and/or second strand of: AD-40068.1 (SEQ ID NOs: 425 and 852), or a modified or unmodified variant thereof.

[3468] A RNAi agent comprising a first and a second strand, wherein the sequence of the first and/or second strand comprise a sequence of 15 contiguous nt from the sequence of a first and/or second strand of: AD-40074.1 (SEQ ID NOs: 426 and 853), or a modified or unmodified variant thereof.

[3469] A RNAi agent comprising a first and a second strand, wherein the sequence of the first and/or second strand comprise a sequence of 15 contiguous nt from the sequence of a first and/or second strand of: AD-40080.1 (SEQ ID NOs: 427 and 854), or a modified or unmodified variant thereof.

[3470] A RNAi agent comprising a first and a second strand, wherein the sequence of the first and/or second strand comprise a sequence of 15 contiguous nt from the sequence of a first and/or second strand of: AD-39720.1 (SEQ ID NOs: 1716 and 1754), or a modified or unmodified variant thereof.

[3471] A RNAi agent comprising a first and a second strand, wherein the sequence of the first and/or second strand comprise a sequence of 15 contiguous nt from the sequence of a first and/or second strand of: AD-39706.1 (SEQ ID NOs: 1717 and 1755), or a modified or unmodified variant thereof.

[3472] A RNAi agent comprising a first and a second strand, wherein the sequence of the first and/or second strand comprise a sequence of 15 contiguous nt from the sequence of a first and/or second strand of: AD-39712.1 (SEQ ID NOs: 1718 and 1756), or a modified or unmodified variant thereof.

[3473] A RNAi agent comprising a first and a second strand, wherein the sequence of the first and/or second strand comprise a sequence of 15 contiguous nt from the sequence of a first and/or second strand of: AD-39760.1 (SEQ ID NOs: 1719 and 1757), or a modified or unmodified variant thereof.

[3474] A RNAi agent comprising a first and a second strand, wherein the sequence of the first and/or second strand comprise a sequence of 15 contiguous nt from the sequence of a first and/or second strand of: AD-39732.1 (SEQ ID NOs: 1720 and 1758), or a modified or unmodified variant thereof. A RNAi agent comprising a first and a second strand, wherein the sequence of the first and/or second strand comprise a sequence of 15 contiguous nt from the sequence of a first and/or second strand of: AD-35541.4 (SEQ ID NOs: 1721 and 1759), or a modified or unmodified variant thereof.

[3475] A RNAi agent comprising a first and a second strand, wherein the sequence of the first and/or second strand comprise a sequence of 15 contiguous nt from the sequence of a first and/or second strand of: AD-39735.1 or hs_KRAS_321_A22S26 (SEQ ID NOs: 1722 and 1760), or a modified or unmodified variant thereof.

[3476] A RNAi agent comprising a first and a second strand, wherein the sequence of the first and/or second strand comprise a sequence of 15 contiguous nt from the sequence of a first and/or second strand of: AD-39741.1, or a modified or unmodified variant thereof.

[3477] A RNAi agent comprising a first and a second strand, wherein the sequence of the first and/or second strand comprise a sequence of 15 contiguous nt from the sequence of a first and/or second strand of: hs_KRAS_322_A22S26 (SEQ ID NOs: 1723 and 1761), or a modified or unmodified variant thereof.

[3478] A RNAi agent comprising a first and a second strand, wherein the sequence of the first and/or second strand comprise a sequence of 15 contiguous nt from the sequence of a first and/or second strand of: AD-39778.1 (SEQ ID NOs: 1724 and 1762), or a modified or unmodified variant thereof.

[3479] A RNAi agent comprising a first and a second strand, wherein the sequence of the first and/or second strand comprise a sequence of 15 contiguous nt from the sequence of a first and/or second strand of: AD-39790.1 (SEQ ID NOs: 1725 and 1763), or a modified or unmodified variant thereof.

[3480] A RNAi agent comprising a first and a second strand, wherein the sequence of the first and/or second strand comprise a sequence of 15 contiguous nt from the sequence of a first and/or second strand of: AD-39822.1 (SEQ ID NOs: 1726 and 1764), or a modified or unmodified variant thereof.

[3481] A RNAi agent comprising a first and a second strand, wherein the sequence of the first and/or second strand comprise a sequence of 15 contiguous nt from the sequence of a first and/or second strand of: AD-35609.4 (SEQ ID NOs: 1727 and 1765), or a modified or unmodified variant thereof.

[3482] A RNAi agent comprising a first and a second strand, wherein the sequence of the first and/or second strand comprise a sequence of 15 contiguous nt from the sequence of a first and/or second strand of: AD-35581.4 (SEQ ID NOs: 1728 and 1766), or a modified or unmodified variant thereof.

[3483] A RNAi agent comprising a first and a second strand, wherein the sequence of the first and/or second strand comprise a sequence of 15 contiguous nt from the sequence of a first and/or second strand of: AD-39845.1 (SEQ ID NOs: 1729 and 1767), or a modified or unmodified variant thereof.

[3484] A RNAi agent comprising a first and a second strand, wherein the sequence of the first and/or second strand comprise a sequence of 15 contiguous nt from the sequence of a first and/or second strand of: AD-39858.1 (SEQ ID NOs: 1730 and 1768), or a modified or unmodified variant thereof.

[3485] A RNAi agent comprising a first and a second strand, wherein the sequence of the first and/or second strand comprise a sequence of 15 contiguous nt from the sequence of a first and/or second strand of: AD-39870.1 (SEQ ID NOs: 1731 and 1769), or a modified or unmodified variant thereof. A RNAi agent comprising a first and a second strand, wherein the sequence of the first and/or second strand comprise a sequence of 15 contiguous nt from the sequence of a first and/or second strand of: AD-35576.4 (SEQ ID NOs: 1732 and 1770), or a modified or unmodified variant thereof.

[3486] A RNAi agent comprising a first and a second strand, wherein the sequence of the first and/or second strand comprise a sequence of 15 contiguous nt from the sequence of a first and/or second strand of: AD-35588.4 (SEQ ID NOs: 1733 and 1771), or a modified or unmodified variant thereof.

[3487] A RNAi agent comprising a first and a second strand, wherein the sequence of the first and/or second strand comprise a sequence of 15 contiguous nt from the sequence of a first and/or second strand of: AD-35600.1 (SEQ ID NOs: 1734 and 1772), or a modified or unmodified variant thereof.

[3488] A RNAi agent comprising a first and a second strand, wherein the sequence of the first and/or second strand comprise a sequence of 15 contiguous nt from the sequence of a first and/or second strand of: AD-35606.1 (SEQ ID NOs: 1735 and 1773), or a modified or unmodified variant thereof.

[3489] A RNAi agent comprising a first and a second strand, wherein the sequence of the first and/or second strand comprise a sequence of 15 contiguous nt from the sequence of a first and/or second strand of: AD-38151.1 (SEQ ID NOs: 1736 and 1774), or a modified or unmodified variant thereof.

[3490] A RNAi agent comprising a first and a second strand, wherein the sequence of the first and/or second strand comprise a sequence of 15 contiguous nt from the sequence of a first and/or second strand of: AD-38163.1 (SEQ ID NOs: 1737 and 1775), or a modified or unmodified variant thereof.

[3491] A RNAi agent comprising a first and a second strand, wherein the sequence of the first and/or second strand comprise a sequence of 15 contiguous nt from the sequence of a first and/or second strand of: AD-39999.1 (SEQ ID NOs: 1738 and 1776), or a modified or unmodified variant thereof.

[3492] A RNAi agent comprising a first and a second strand, wherein the sequence of the first and/or second strand comprise a sequence of 15 contiguous nt from the sequence of a first and/or second strand of: AD-38159.1 or hs_KRAS_528_A22S26 (SEQ ID NOs: 1739 and 1777), or a modified or unmodified variant thereof.

[3493] A RNAi agent comprising a first and a second strand, wherein the sequence of the first and/or second strand comprise a sequence of 15 contiguous nt from the sequence of a first and/or second strand of: AD-38130.1 or hs_KRAS_531_A22S26 (SEQ ID NOs: 1740 and 1778), or a modified or unmodified variant thereof.

[3494] A RNAi agent comprising a first and a second strand, wherein the sequence of the first and/or second strand comprise a sequence of 15 contiguous nt from the sequence of a first and/or second strand of: AD-38136.1 (SEQ ID NOs: 1741 and 1779), or a modified or unmodified variant thereof.

[3495] A RNAi agent comprising a first and a second strand, wherein the sequence of the first and/or second strand comprise a sequence of 15 contiguous nt from the sequence of a first and/or second strand of: AD-40036.1 (SEQ ID NOs: 1742 and 1780), or a modified or unmodified variant thereof.

[3496] A RNAi agent comprising a first and a second strand, wherein the sequence of the first and/or second strand comprise a sequence of 15 contiguous nt from the sequence of a first and/or second strand of: AD-40008.1 (SEQ ID NOs: 1743 and 1781), or a modified or unmodified variant thereof. A RNAi agent comprising a first and a second strand, wherein the sequence of the first and/or second strand comprise a sequence of 15 contiguous nt from the sequence of a first and/or second strand of: AD-40021.1 (SEQ ID NOs: 1744 and 1782), or a modified or unmodified variant thereof.

[3497] A RNAi agent comprising a first and a second strand, wherein the sequence of the first and/or second strand comprise a sequence of 15 contiguous nt from the sequence of a first and/or second strand of: AD-40077.1 (SEQ ID NOs: 1745 and 1783), or a modified or unmodified variant thereof.

[3498] A RNAi agent comprising a first and a second strand, wherein the sequence of the first and/or second strand comprise a sequence of 15 contiguous nt from the sequence of a first and/or second strand of: AD-40072.1 (SEQ ID NOs: 1746 and 1784), or a modified or unmodified variant thereof.

[3499] A RNAi agent comprising a first and a second strand, wherein the sequence of the first and/or second strand comprise a sequence of 15 contiguous nt from the sequence of a first and/or second strand of: AD-40061.1 (SEQ ID NOs: 1747 and 1785), or a modified or unmodified variant thereof.

[3500] A RNAi agent comprising a first and a second strand, wherein the sequence of the first and/or second strand comprise a sequence of 15 contiguous nt from the sequence of a first and/or second strand of: AD-40068.1 (SEQ ID NOs: 1748 and 1786), or a modified or unmodified variant thereof.

[3501] A RNAi agent comprising a first and a second strand, wherein the sequence of the first and/or second strand comprise a sequence of 15 contiguous nt from the sequence of a first and/or second strand of: AD-38131.1 (SEQ ID NOs: 1749 and 1787), or a modified or unmodified variant thereof.

[3502] A RNAi agent comprising a first and a second strand, wherein the sequence of the first and/or second strand comprise a sequence of 15 contiguous nt from the sequence of a first and/or second strand of: AD-38167.1 (SEQ ID NOs: 1750 and 1788), or a modified or unmodified variant thereof.

[3503] A RNAi agent comprising a first and a second strand, wherein the sequence of the first and/or second strand comprise a sequence of 15 contiguous nt from the sequence of a first and/or second strand of: hs_KRAS 1273_A22S26 (SEQ ID NOs: 1751 and 1789), or a modified or unmodified variant thereof.

[3504] A RNAi agent comprising a first and a second strand, wherein the sequence of the first and/or second strand comprise a sequence of 15 contiguous nt from the sequence of a first and/or second strand of: hs_KRAS 2892_A37S26 (SEQ ID NOs: 1752 and 1790), or a modified or unmodified variant thereof.

[3505] A RNAi agent comprising a first and a second strand, wherein the sequence of the first and/or second strand comprise a sequence of 15 contiguous nt from the sequence of a first and/or second strand of: hs_KRAS 4731_A22S26 (SEQ ID NOs: 1753 and 1791), or a modified or unmodified variant thereof.

[3506] In various embodiments, the disclosure comprises a RNAi agent comprising a sense and an antisense strand, wherein the antisense strand comprises at least 15 contiguous nucleotides differing by 0, 1, 2, or 3 nt from the antisense strand of any RNAi agent disclosed herein, or a modified or unmodified variant thereof, wherein the antisense strand optionally further comprises 0, 1, 2, 3, 4, 5, 6, 7, 8, 9, or 10 or more nt (or any range thereof, e.g., 0-1, 1-2, 1-3, 1-4 nt, etc.).

[3507] In one embodiment, the disclosure comprises any one or more RNAi agent listed herein.

### Overlapping Sets of RNAi Agents to KRAS

[3508] In various embodiments, the present disclosure relates to groups of RNAi agents to KRAS with overlapping sequences. Thus, the present disclosure encompasses groups of RNAi agents wherein each RNAi agent in the group overlaps with each other RNAi agent in the same group by at least 5, 6, 7, 8, 9, 10, 11, 12, 13, 14, 15, 16, 17, 18, 19 or more nucleotides. Particularly, in one embodiment, the overlap is at least 12 nt.

[3509] Some of the RNAi agents listed herein overlap each other in sequence. Table 2 presents a compilation of some of these groups of overlapping RNAi agents, wherein each member of a group overlaps with each other member of the same group by at least 12 nt. A 12-nt portion of the overlap of the sense and anti-sense strand are presented.

[3510] Thus, for example, as shown in Table 4, the sequences of duplexes AD-39695.1, AD-39689.1, AD-39707.1, AD-39683.1, and AD-39701.1 all overlap, wherein the overlap in sense strand comprises the sequence CUGAAUAUAAAC (SEQ ID NO: 1874) and the overlap in the anti-sense strand comprises the sequence GUUUAUAUUCAG (SEQ ID NO: 1875).

[3511] However, in the present disclosure encompasses any set or subset or group or subgroup of KRAS RNAi agents which share the common technical feature of a sequence overlap (e.g., by at least 12 nt). Thus the present disclosure also encompasses the example groups of AD-39695.1, AD-39689.1, AD-39707.1, AD-39683.1, and AD-39701.1, but also these subgroups: AD-39695.1 and AD-39689.1; AD-39695.1 and AD-39707.1; AD-39695.1, AD-39689.1, and AD-39701.1; AD-39689.1, AD-39707.1, and AD-39701.1; AD-39707.1 and AD-39683.1; AD-39707.1, AD-39683.1, and AD-39701.1; etc, and any other group of overlapping KRAS RNAi agents.

[3512] Thus, these and other various sets of overlapping RNAi agents presented in Table 4 share common technical features, for example, the overlap in the sense and anti-sense strand.

[3513] Particular sets of overlapping RNAi agents to KRAS are provided below in Table 4.

[3514] The present disclosure thus encompasses any group or subgroup of RNAi agents comprising a common technical feature, wherein the common technical feature is an overlap (e.g., of at least 12 nt) of a sequence in the sense or anti-sense strand.

[3515] Thus: The present disclosure encompasses a RNAi agent comprising a first and a second strand, wherein the first strand comprises at least 15 contiguous nucleotides differing by 0, 1, 2, or 3 nt from the first strand of, and/or the second strand comprises at least 15 contiguous nucleotides differing by 0, 1, 2, or 3 nt from the second strand, of any of the group or subgroup or set or subset of overlapping RNAi agents presented in Table 4.

[3516] The present disclosure similarly encompasses various embodiments encompassing groups of overlapping RNAi agents presented in Table 4.

### Additional Definitions

[3517] Unless defined otherwise, the technical and scientific terms used herein have the same meaning as that usually understood by a specialist familiar with the field to which the present disclosure belongs.

[3518] Unless indicated otherwise, all methods, steps, techniques and manipulations that are not specifically described in detail can be performed and have been performed in a manner known per se, as will be clear to the skilled person. Reference is for example again made to the standard handbooks and the general background art mentioned herein and to the further references cited therein.

[3519] Claims to the present disclosure are non-limiting and are provided below.

[3520] Although particular embodiments and claims have been disclosed herein in detail, this has been done by way of example for purposes of illustration only, and is not intended to be limiting with respect to the scope of the appended claims, or the scope of subject matter of claims of any corresponding future application. In particular, it is contemplated by the inventors that various substitutions, alterations, and modifications may be made to the present disclosure without departing from the spirit and scope of the present disclosure as defined by the claims. The choice of nucleic acid starting material, clone of interest, or library type is believed to be a matter of routine for a person of ordinary skill in the art with knowledge of the embodiments described herein. Other aspects, advantages, and modifications considered to be within the scope of the following claims. Redrafting of claim scope in later-filed corresponding applications may be due to limitations by the patent laws of various countries and should not be interpreted as giving up subject matter of the claims.

[3521] Various additional formulations and obvious variants of the described RNAi agents to KRAS can be devised by those of ordinary skill in the art. Non-limiting example RNAi agents to KRAS are described in the Examples below, which do not limit the scope of the present disclosure as described in the claims.

### EXAMPLES

### Example 1. Bioinformatics and KRAS RNAi Agent (siRNA) Sequences

[3522] The sequences of unmodified and example modified KRAS RNAi agent sequences are provided in Tables 2 and 3, below.

[3523] KRAS oligonucleotide design is carried out to identify siRNAs targeting mRNAs encoding the KRAS gene.

### Experimental Methods

### Bioinformatics

[3524] Transcripts. siRNA design is carried out to identify RNAi agents (e.g., siRNAs) targeting the human Kirsten rat sarcoma viral oncogene (KRAS). Design uses the following transcripts from the NCBI RefSeq collection: KRAS-NM_033360.2, NM_004985.3. For KRAS, the requirement of perfect matching to the non-human primate Macaca fascicularis is waived.

[3525] siRNA Design and Specificity Prediction. The predicted specificity of all possible 19mers is predicted from each sequence. Candidate 19mers are then selected as matching Coding Sequence (“CDS”) or Untranslated Regions (“UTRs”). The candidate siRNAs for each gene (KRAS, 432 from CDS) are used in a comprehensive search against the human transcriptome (defined as the set of NM_and XM_records within the human NCBI Refseq set) using the FASTA algorithm. The perl script ‘parseFasta.pl’ is then used to parse the alignments and generate a score based on the position and number of mismatches between the siRNA and any potential ‘off-target’ transcript. The off-target score is weighted to emphasize differences in the ‘seed’ region of siRNAs, in positions 2-9 from the 5′ end of the molecule. Each oligo-transcript pair from the FASTA search is given a mismatch score by summing the individual mismatch scores; mismatches in the position 2-9 are counted as 2.8, mismatches in the cleavage site positions 10-11 are counted as 1.2, and mismatches in region 12-19 counted as 1.0. An additional off-target prediction is carried out by comparing the frequency of heptamers and octomers derived from 3 distinct, seed-derived hexamers of each oligo. The hexamers from positions 2-7 relative to the 5′ start is used to create 2 heptamers and one octomer. We create ‘heptamer1’ by adding a 3′ A to the hexamer; we create heptamer2 by adding a 5′ A to the hexamer; we create the octomer by adding an A to both 5′ and 3′ ends of the hexamer. The frequency of octomers and heptamers in the human 3′UTRome (defined as the subsequence of the transcriptome from NCBI's Refseq database where the end of the coding region, the ‘CDS’, is clearly defined) is pre-calculated. The octomer frequency is normalized to the heptamer frequency using the median value from the range of octomer frequencies. A ‘mirSeedScore’ is then calculated by calculating the sum of [(3× normalized octomer count)+(2× heptamer2 count)+(1× heptamer1 count)].

[3526] Both siRNAs strands are assigned to a category of specificity according to the calculated scores: a score above 3 qualifies as highly specific, equal to 3 as specific and between 2.2 and 2.8 as moderately specific. We sorted by the specificity of the antisense strand.

[3527] siRNA sequence selection. Sense and antisense derived siRNA oligos are synthesized and formed into duplexes. The total numbers of duplexes per gene were: KRAS, 432.

### Synthesis of KRAS Sequences

[3528] Synthesis: KRAS sequences are synthesized on MerMade 192 synthesizer at 1 μmol scale. A total of 864 single strands (432 duplexes) for KRAS are synthesized for the human KRAS gene. For all the sequences, ‘endolight’ chemistry is applied as detailed below.
[3529] All pyrimidines (cytosine and uridine) in the sense strand are replaced with corresponding 2′-O-Methyl bases (2′ 0-Methyl C and 2′-O-Methyl U)
[3530] In the antisense strand, pyrimidines (C and U) adjacent to (towards 5′ position) ribo A nucleoside are replaced with their corresponding 2-O-Methyl nucleosides
[3531] A two base dTdT extension at 3′ end of both sense and anti sense sequences is introduced. This two base overhang has a phosphodiester linkage
[3532] The sequence file is converted to a text file to make it compatible for loading in the MerMade 192 synthesis software
[3533] A unique ID is generated for each single strand and these are shown in Tables 1 to 3.

[3534] The synthesis of KRAS sequences used solid supported oligonucleotide synthesis using phosphoramidite chemistry

[3535] The synthesis of the above sequences is performed at 1 μm scale in 96 well plates and 192 sequences are made per run. The amidite solutions are prepared at 0.1M concentration and ethyl thio tetrazole (0.6M in Acetonitrile) is used as activator.

[3536] Cleavage and Deprotection: The synthesized sequences are cleaved and deprotected in 96 well plates, using a mixture of aqueous and ethanolic methylamine (3:1 ratio) in the first step and triethylamine ³HF in the second step. The crude sequences thus obtained are precipitated using acetone: ethanol mix and the pellet are re-suspended in 0.02M sodium acetate buffer. Samples from each sequence are analyzed by LC-MS and the resulting mass data confirmed the identity of the sequences. A selected set of samples are also analyzed by IEX chromatography.

[3537] Purification and Desalting: All single strands are isolated as desalted solutions in water prior to annealing step. Sequences are purified on AKTA explorer purification system using Source 15Q column. Purification is performed using a column and in-line buffer heater set at 6000. A single peak corresponding to the full length sequence is collected in the eluant and is subsequently analyzed for purity by ion exchange chromatography.

[3538] The purified sequences are desalted on a Sephadex G25 column using AKTA purifier. The desalted KRAS sequences are analyzed for concentration and purity. The single strands are annealed on an automated platform to form siRNA duplexes. Each duplex is made at a concentration of 10 μM in 1×PBS and are analyzed for purity by capillary gel electrophoresis. Details on individual duplexes are provided in Tables 1 to 3. Some sequences in Table 2, and other tables herein, represent the DNA target of the recited RNAi agent (these DNA targets comprise DNA sequences, comprising T, rather than RNA sequences, which comprise U).

TABLE 2
KRAS duplexes with unmodified sequences

| | | SEQ ID | | SEQ ID |
|---|---|---|---|---|
| Duplex | Sense Seq | NO: | Antisense Seq | NO: |
| AD-35523.3 | GGACGAAUAUGAUCCAACA | 1 | UGUUGGAUCAUAUUCGUCC | 428 |
| AD-35529.1 | GACGAAUAUGAUCCAACAA | 2 | UUGUUGGAUCAUAUUCGUC | 429 |
| AD-35535.4 | ACGAAUAUGAUCCAACAAU | 3 | AUUGUUGGAUCAUAUUCGU | 430 |
| AD-35541.4 | CGAAUAUGAUCCAACAAUA | 4 | UAUUGUUGGAUCAUAUUCG | 431 |
| AD-35547.4 | GAAUAUGAUCCAACAAUAG | 5 | CUAUUGUUGGAUCAUAUUC | 432 |
| AD-35553.4 | AAUAUGAUCCAACAAUAGA | 6 | UCUAUUGUUGGAUCAUAUU | 433 |
| AD-35559.4 | AUAUGAUCCAACAAUAGAG | 7 | CUCUAUUGUUGGAUCAUAU | 434 |
| AD-35565.4 | UAUGAUCCAACAAUAGAGG | 8 | CCUCUAUUGUUGGAUCAUA | 435 |
| AD-35524.4 | AUGAUCCAACAAUAGAGGA | 9 | UCCUCUAUUGUUGGAUCAU | 436 |
| AD-35530.4 | UGAUCCAACAAUAGAGGAU | 10 | AUCCUCUAUUGUUGGAUCA | 437 |
| AD-35536.4 | GAUCCAACAAUAGAGGAUU | 11 | AAUCCUCUAUUGUUGGAUC | 438 |
| AD-35542.4 | AUCCAACAAUAGAGGAUUC | 12 | GAAUCCUCUAUUGUUGGAU | 439 |
| AD-35548.4 | UCCAACAAUAGAGGAUUCC | 13 | GGAAUCCUCUAUUGUUGGA | 440 |
| AD-35554.4 | CCAACAAUAGAGGAUUCCU | 14 | AGGAAUCCUCUAUUGUUGG | 441 |
| AD-35560.2 | CAACAAUAGAGGAUUCCUA | 15 | UAGGAAUCCUCUAUUGUUG | 442 |
| AD-35566.4 | AACAAUAGAGGAUUCCUAC | 16 | GUAGGAAUCCUCUAUUGUU | 443 |
| AD-35525.2 | ACAAUAGAGGAUUCCUACA | 17 | UGUAGGAAUCCUCUAUUGU | 444 |
| AD-35531.4 | CAAUAGAGGAUUCCUACAG | 18 | CUGUAGGAAUCCUCUAUUG | 445 |
| AD-35537.4 | AAUAGAGGAUUCCUACAGG | 19 | CCUGUAGGAAUCCUCUAUU | 446 |
| AD-35543.2 | AUAGAGGAUUCCUACAGGA | 20 | UCCUGUAGGAAUCCUCUAU | 447 |
| AD-35549.4 | UAGAGGAUUCCUACAGGAA | 21 | UUCCUGUAGGAAUCCUCUA | 448 |
| AD-35555.4 | AGAGGAUUCCUACAGGAAG | 22 | CUUCCUGUAGGAAUCCUCU | 449 |
| AD-35561.4 | GAGGAUUCCUACAGGAAGC | 23 | GCUUCCUGUAGGAAUCCUC | 450 |
| AD-35567.4 | AGGAUUCCUACAGGAAGCA | 24 | UGCUUCCUGUAGGAAUCCU | 451 |
| AD-35526.4 | GGAUUCCUACAGGAAGCAA | 25 | UUGCUUCCUGUAGGAAUCC | 452 |
| AD-35532.4 | GAUUCCUACAGGAAGCAAG | 26 | CUUGCUUCCUGUAGGAAUC | 453 |
| AD-35538.4 | AUUCCUACAGGAAGCAAGU | 27 | ACUUGCUUCCUGUAGGAAU | 454 |
| AD-35544.4 | UUCCUACAGGAAGCAAGUA | 28 | UACUUGCUUCCUGUAGGAA | 455 |
| AD-35550.4 | UCCUACAGGAAGCAAGUAG | 29 | CUACUUGCUUCCUGUAGGA | 456 |
| AD-35556.4 | CCUACAGGAAGCAAGUAGU | 30 | ACUACUUGCUUCCUGUAGG | 457 |
| AD-35562.4 | CUACAGGAAGCAAGUAGUA | 31 | UACUACUUGCUUCCUGUAG | 458 |
| AD-35568.4 | UACAGGAAGCAAGUAGUAA | 32 | UUACUACUUGCUUCCUGUA | 459 |
| AD-35527.4 | ACAGGAAGCAAGUAGUAAU | 33 | AUUACUACUUGCUUCCUGU | 460 |
| AD-35533.4 | CAGGAAGCAAGUAGUAAUU | 34 | AAUUACUACUUGCUUCCUG | 461 |
| AD-35539.4 | UUGGAUAUUCUCGACACAG | 35 | CUGUGUCGAGAAUAUCCAA | 462 |
| AD-35545.4 | UGGAUAUUCUCGACACAGC | 36 | GCUGUGUCGAGAAUAUCCA | 463 |
| AD-35551.4 | GGAUAUUCUCGACACAGCA | 37 | UGCUGUGUCGAGAAUAUCC | 464 |
| AD-35563.4 | AUAUUCUCGACACAGCAGG | 38 | CCUGCUGUGUCGAGAAUAU | 465 |
| AD-35528.4 | AUUCUCGACACAGCAGGUC | 39 | GACCUGCUGUGUCGAGAAU | 466 |
| AD-35540.4 | UCUCGACACAGCAGGUCAA | 40 | UUGACCUGCUGUGUCGAGA | 467 |
| AD-35546.4 | CUCGACACAGCAGGUCAAG | 41 | CUUGACCUGCUGUGUCGAG | 468 |
| AD-35552.4 | UCGACACAGCAGGUCAAGA | 42 | UCUUGACCUGCUGUGUCGA | 469 |
| AD-35558.4 | CGACACAGCAGGUCAAGAG | 43 | CUCUUGACCUGCUGUGUCG | 470 |
| AD-35564.4 | GACACAGCAGGUCAAGAGG | 44 | CCUCUUGACCUGCUGUGUC | 471 |
| AD-35570.4 | ACACAGCAGGUCAAGAGGA | 45 | UCCUCUUGACCUGCUGUGU | 472 |
| AD-35571.4 | CACAGCAGGUCAAGAGGAG | 46 | CUCCUCUUGACCUGCUGUG | 473 |
| AD-35577.4 | ACAGCAGGUCAAGAGGAGU | 47 | ACUCCUCUUGACCUGCUGU | 474 |
| AD-35583.4 | CAGCAGGUCAAGAGGAGUA | 48 | UACUCCUCUUGACCUGCUG | 475 |
| AD-35589.4 | AGCAGGUCAAGAGGAGUAC | 49 | GUACUCCUCUUGACCUGCU | 476 |
| AD-35595.4 | GCAGGUCAAGAGGAGUACA | 50 | UGUACUCCUCUUGACCUGC | 477 |
| AD-35601.4 | CAGGUCAAGAGGAGUACAG | 51 | CUGUACUCCUCUUGACCUG | 478 |
| AD-35607.4 | AGGUCAAGAGGAGUACAGU | 52 | ACUGUACUCCUCUUGACCU | 479 |
| AD-35613.4 | GGUCAAGAGGAGUACAGUG | 53 | CACUGUACUCCUCUUGACC | 480 |
| AD-35572.4 | GUCAAGAGGAGUACAGUGC | 54 | GCACUGUACUCCUCUUGAC | 481 |
| AD-35578.4 | UCAAGAGGAGUACAGUGCA | 55 | UGCACUGUACUCCUCUUGA | 482 |
| AD-35584.4 | CAAGAGGAGUACAGUGCAA | 56 | UUGCACUGUACUCCUCUUG | 483 |
| AD-35590.4 | AAGAGGAGUACAGUGCAAU | 57 | AUUGCACUGUACUCCUCUU | 484 |
| AD-35596.4 | AGAGGAGUACAGUGCAAUG | 58 | CAUUGCACUGUACUCCUCU | 485 |
| AD-35602.4 | GAGGAGUACAGUGCAAUGA | 59 | UCAUUGCACUGUACUCCUC | 486 |
| AD-35608.4 | AGGAGUACAGUGCAAUGAG | 60 | CUCAUUGCACUGUACUCCU | 487 |
| AD-35614.4 | GGAGUACAGUGCAAUGAGG | 61 | CCUCAUUGCACUGUACUCC | 488 |
| AD-35573.4 | GAGUACAGUGCAAUGAGGG | 62 | CCCUCAUUGCACUGUACUC | 489 |
| AD-35579.4 | GGGGAGGGCUUUCUUUGUG | 63 | CACAAAGAAAGCCCUCCCC | 490 |
| AD-35585.4 | GGGAGGGCUUUCUUUGUGU | 64 | ACACAAAGAAAGCCCUCCC | 491 |
| AD-35591.4 | GGAGGGCUUUCUUUGUGUA | 65 | UACACAAAGAAAGCCCUCC | 492 |
| AD-35597.4 | GAGGGCUUUCUUUGUGUAU | 66 | AUACACAAAGAAAGCCCUC | 493 |
| AD-35603.4 | AGGGCUUUCUUUGUGUAUU | 67 | AAUACACAAAGAAAGCCCU | 494 |
| AD-35609.4 | GGGCUUUCUUUGUGUAUUU | 68 | AAAUACACAAAGAAAGCCC | 495 |
| AD-35615.4 | GGCUUUCUUUGUGUAUUUG | 69 | CAAAUACACAAAGAAAGCC | 496 |
| AD-35574.4 | GCUUUCUUUGUGUAUUUGC | 70 | GCAAAUACACAAAGAAAGC | 497 |
| AD-35580.1 | CUUUCUUUGUGUAUUUGCC | 71 | GGCAAAUACACAAAGAAAG | 498 |
| AD-35586.4 | UUUCUUUGUGUAUUUGCCA | 72 | UGGCAAAUACACAAAGAAA | 499 |
| AD-35592.4 | UUCUUUGUGUAUUUGCCAU | 73 | AUGGCAAAUACACAAAGAA | 500 |
| AD-35598.4 | UCUUUGUGUAUUUGCCAUA | 74 | UAUGGCAAAUACACAAAGA | 501 |
| AD-35604.4 | CUUUGUGUAUUUGCCAUAA | 75 | UUAUGGCAAAUACACAAAG | 502 |
| AD-35610.4 | UUUGUGUAUUUGCCAUAAA | 76 | UUUAUGGCAAAUACACAAA | 503 |
| AD-35616.4 | UUGUGUAUUUGCCAUAAAU | 77 | AUUUAUGGCAAAUACACAA | 504 |
| AD-35575.4 | UGUGUAUUUGCCAUAAAUA | 78 | UAUUUAUGGCAAAUACACA | 505 |
| AD-35581.4 | GUGUAUUUGCCAUAAAUAA | 79 | UUAUUUAUGGCAAAUACAC | 506 |
| AD-35587.4 | UGUAUUUGCCAUAAAUAAU | 80 | AUUAUUUAUGGCAAAUACA | 507 |
| AD-35593.4 | GUAUUUGCCAUAAAUAAUA | 81 | UAUUAUUUAUGGCAAAUAC | 508 |
| AD-35599.4 | UAUUUGCCAUAAAUAAUAC | 82 | GUAUUAUUUAUGGCAAAUA | 509 |
| AD-35605.4 | AUUUGCCAUAAAUAAUACU | 83 | AGUAUUAUUUAUGGCAAAU | 510 |
| AD-35611.4 | UUUGCCAUAAAUAAUACUA | 84 | UAGUAUUAUUUAUGGCAAA | 511 |
| AD-35617.4 | UGAAGAUAUUCACCAUUAU | 85 | AUAAUGGUGAAUAUCUUCA | 512 |
| AD-35576.4 | aAAGAUAUUCACCAUUAUA | 86 | UAUAAUGGUGAAUAUCUUC | 513 |
| AD-35588.4 | AGAUAUUCACCAUUAUAGA | 87 | UCUAUAAUGGUGAAUAUCU | 514 |
| AD-35667.1 | AAACAUCAGCAAAGACAAG | 88 | CUUGUCUUUGCUGAUGUUU | 515 |
| AD-35673.1 | AACAUCAGCAAAGACAAGA | 89 | UCUUGUCUUUGCUGAUGUU | 516 |
| AD-35679.1 | ACAUCAGCAAAGACAAGAC | 90 | GUCUUGUCUUUGCUGAUGU | 517 |
| AD-35685.1 | CAUCAGCAAAGACAAGACA | 91 | UGUCUUGUCUUUGCUGAUG | 518 |
| AD-35691.1 | AUCAGCAAAGACAAGACAG | 92 | CUGUCUUGUCUUUGCUGAU | 519 |
| AD-35557.1 | GAUAUUCUCGACACAGCAG | 93 | CUGCUGUGUCGAGAAUAUC | 520 |
| AD-35618.1 | UUCACCAUUAUAGAGAACA | 94 | UGUUCUCUAUAAUGGUGAA | 521 |
| AD-35569.1 | UAUUCUCGACACAGCAGGU | 95 | ACCUGCUGUGUCGAGAAUA | 522 |
| AD-35534.1 | UUCUCGACACAGCAGGUCA | 96 | UGACCUGCUGUGUCGAGAA | 523 |
| AD-35582.1 | AAGAUAUUCACCAUUAUAG | 97 | CUAUAAUGGUGAAUAUCUU | 524 |
| AD-35594.1 | GAUAUUCACCAUUAUAGAG | 98 | CUCUAUAAUGGUGAAUAUC | 525 |
| AD-35600.1 | AUAUUCACCAUUAUAGAGA | 99 | UCUCUAUAAUGGUGAAUAU | 526 |
| AD-35606.1 | UAUUCACCAUUAUAGAGAA | 100 | UUCUCUAUAAUGGUGAAUA | 527 |
| AD-35612.1 | AUUCACCAUUAUAGAGAAC | 101 | GUUCUCUAUAAUGGUGAAU | 528 |
| AD-38127.1 | UCACCAUUAUAGAGAACAA | 102 | UUGUUCUCUAUAAUGGUGA | 529 |
| AD-38133.1 | CACCAUUAUAGAGAACAAA | 103 | UUUGUUCUCUAUAAUGGUG | 530 |
| AD-38139.1 | ACCAUUAUAGAGAACAAAU | 104 | AUUUGUUCUCUAUAAUGGU | 531 |
| AD-38145.1 | CCAUUAUAGAGAACAAAUU | 105 | AAUUUGUUCUCUAUAAUGG | 532 |
| AD-38151.1 | CAUUAUAGAGAACAAAUUA | 106 | UAAUUUGUUCUCUAUAAUG | 533 |
| AD-38157.1 | AUUAUAGAGAACAAAUUAA | 107 | UUAAUUUGUUCUCUAUAAU | 534 |
| AD-38163.1 | UUAUAGAGAACAAAUUAAA | 108 | UUUAAUUUGUUCUCUAUAA | 535 |
| AD-38169.1 | UAUAGAGAACAAAUUAAAA | 109 | UUUUAAUUUGUUCUCUAUA | 536 |
| AD-38128.1 | AUAGAGAACAAAUUAAAAG | 110 | CUUUUAAUUUGUUCUCUAU | 537 |
| AD-38134.1 | UAGAGAACAAAUUAAAAGA | 111 | UCUUUUAAUUUGUUCUCUA | 538 |
| AD-38140.1 | AGAGAACAAAUUAAAAGAG | 112 | CUCUUUUAAUUUGUUCUCU | 539 |
| AD-38146.1 | GAAGAUGUACCUAUGGUCC | 113 | GGACCAUAGGUACAUCUUC | 540 |
| AD-38152.1 | AAGAUGUACCUAUGGUCCU | 114 | AGGACCAUAGGUACAUCUU | 541 |
| AD-38158.1 | AGAUGUACCUAUGGUCCUA | 115 | UAGGACCAUAGGUACAUCU | 542 |
| AD-38164.1 | GAUGUACCUAUGGUCCUAG | 116 | CUAGGACCAUAGGUACAUC | 543 |
| AD-38170.1 | AUGUACCUAUGGUCCUAGU | 117 | ACUAGGACCAUAGGUACAU | 544 |
| AD-38129.1 | UGUACCUAUGGUCCUAGUA | 118 | UACUAGGACCAUAGGUACA | 545 |
| AD-38135.1 | GUACCUAUGGUCCUAGUAG | 119 | CUACUAGGACCAUAGGUAC | 546 |
| AD-38141.1 | UACCUAUGGUCCUAGUAGG | 120 | CCUACUAGGACCAUAGGUA | 547 |
| AD-38147.1 | ACCUAUGGUCCUAGUAGGA | 121 | UCCUACUAGGACCAUAGGU | 548 |
| AD-38153.1 | CCUAUGGUCCUAGUAGGAA | 122 | UUCCUACUAGGACCAUAGG | 549 |
| AD-38159.1 | CUAUGGUCCUAGUAGGAAA | 123 | UUUCCUACUAGGACCAUAG | 550 |
| AD-38165.1 | UAUGGUCCUAGUAGGAAAU | 124 | AUUUCCUACUAGGACCAUA | 551 |
| AD-38171.1 | AUGGUCCUAGUAGGAAAUA | 125 | UAUUUCCUACUAGGACCAU | 552 |
| AD-38130.1 | UGGUCCUAGUAGGAAAUAA | 126 | UUAUUUCCUACUAGGACCA | 553 |
| AD-38136.1 | GGUCCUAGUAGGAAAUAAA | 127 | UUUAUUUCCUACUAGGACC | 554 |
| AD-38142.1 | GUCCUAGUAGGAAAUAAAU | 128 | AUUUAUUUCCUACUAGGAC | 555 |
| AD-38148.1 | UCCUAGUAGGAAAUAAAUG | 129 | CAUUUAUUUCCUACUAGGA | 556 |
| AD-38154.1 | CCUAGUAGGAAAUAAAUGU | 130 | ACAUUUAUUUCCUACUAGG | 557 |
| AD-38160.1 | CUAGUAGGAAAUAAAUGUG | 131 | CACAUUUAUUUCCUACUAG | 558 |
| AD-38166.1 | UAGUAGGAAAUAAAUGUGA | 132 | UCACAUUUAUUUCCUACUA | 559 |
| AD-38172.1 | AGUAGGAAAUAAAUGUGAU | 133 | AUCACAUUUAUUUCCUACU | 560 |
| AD-38131.1 | GGAAUUCCUUUUAUUGAAA | 134 | UUUCAAUAAAAGGAAUUCC | 561 |
| AD-38137.1 | GAAUUCCUUUUAUUGAAAC | 135 | GUUUCAAUAAAAGGAAUUC | 562 |
| AD-38143.1 | AAUUCCUUUUAUUGAAACA | 136 | UGUUUCAAUAAAAGGAAUU | 563 |
| AD-38149.1 | AUUCCUUUUAUUGAAACAU | 137 | AUGUUUCAAUAAAAGGAAU | 564 |
| AD-38155.1 | UUCCUUUUAUUGAAACAUC | 138 | GAUGUUUCAAUAAAAGGAA | 565 |
| AD-38161.1 | UCCUUUUAUUGAAACAUCA | 139 | UGAUGUUUCAAUAAAAGGA | 566 |
| AD-38167.1 | CCUUUUAUUGAAACAUCAG | 140 | CUGAUGUUUCAAUAAAAGG | 567 |
| AD-38173.1 | CUUUUAUUGAAACAUCAGC | 141 | GCUGAUGUUUCAAUAAAAG | 568 |
| AD-38132.1 | UUUUAUUGAAACAUCAGCA | 142 | UGCUGAUGUUUCAAUAAAA | 569 |
| AD-38138.1 | UUUAUUGAAACAUCAGCAA | 143 | UUGCUGAUGUUUCAAUAAA | 570 |
| AD-38144.1 | UUAUUGAAACAUCAGCAAA | 144 | UUUGCUGAUGUUUCAAUAA | 571 |
| AD-38150.1 | UAUUGAAACAUCAGCAAAG | 145 | CUUUGCUGAUGUUUCAAUA | 572 |
| AD-38156.1 | AUUGAAACAUCAGCAAAGA | 146 | UCUUUGCUGAUGUUUCAAU | 573 |
| AD-38162.1 | UUGAAACAUCAGCAAAGAC | 147 | GUCUUUGCUGAUGUUUCAA | 574 |
| AD-38168.1 | UGAAACAUCAGCAAAGACA | 148 | UGUCUUUGCUGAUGUUUCA | 575 |
| AD-38174.1 | GAAACAUCAGCAAAGACAA | 149 | UUGUCUUUGCUGAUGUUUC | 576 |
| AD-39683.1 | AUGACUGAAUAUAAACUUG | 150 | CAAGUUUAUAUUCAGUCAU | 577 |
| AD-39689.1 | UGACUGAAUAUAAACUUGU | 151 | ACAAGUUUAUAUUCAGUCA | 578 |
| AD-39695.1 | GACUGAAUAUAAACUUGUG | 152 | CACAAGUUUAUAUUCAGUC | 579 |
| AD-39701.1 | ACUGAAUAUAAACUUGUGG | 153 | CCACAAGUUUAUAUUCAGU | 580 |
| AD-39707.1 | CUGAAUAUAAACUUGUGGU | 154 | ACCACAAGUUUAUAUUCAG | 581 |
| AD-39713.1 | UGAAUAUAAACUUGUGGUA | 155 | UACCACAAGUUUAUAUUCA | 582 |
| AD-39719.1 | GAAUAUAAACUUGUGGUAG | 156 | CUACCACAAGUUUAUAUUC | 583 |
| AD-39725.1 | AAUAUAAACUUGUGGUAGU | 157 | ACUACCACAAGUUUAUAUU | 584 |
| AD-39684.1 | AUAUAAACUUGUGGUAGUU | 158 | AACUACCACAAGUUUAUAU | 585 |
| AD-39690.1 | UAUAAACUUGUGGUAGUUG | 159 | CAACUACCACAAGUUUAUA | 586 |
| AD-39696.1 | AUAAACUUGUGGUAGUUGG | 160 | CCAACUACCACAAGUUUAU | 587 |
| AD-39702.1 | UAAACUUGUGGUAGUUGGA | 161 | UCCAACUACCACAAGUUUA | 588 |
| AD-39708.1 | AAACUUGUGGUAGUUGGAG | 162 | CUCCAACUACCACAAGUUU | 589 |
| AD-39714.1 | AACUUGUGGUAGUUGGAGC | 163 | GCUCCAACUACCACAAGUU | 590 |
| AD-39720.1 | ACUUGUGGUAGUUGGAGCU | 164 | AGCUCCAACUACCACAAGU | 591 |
| AD-39726.1 | CUUGUGGUAGUUGGAGCUG | 165 | CAGCUCCAACUACCACAAG | 592 |
| AD-39685.1 | UUGUGGUAGUUGGAGCUGG | 166 | CCAGCUCCAACUACCACAA | 593 |
| AD-39691.1 | UGUGGUAGUUGGAGCUGGU | 167 | ACCAGCUCCAACUACCACA | 594 |
| AD-39697.1 | GUGGUAGUUGGAGCUGGUG | 168 | CACCAGCUCCAACUACCAC | 595 |
| AD-39703.1 | UGGUAGUUGGAGCUGGUGG | 169 | CCACCAGCUCCAACUACCA | 596 |
| AD-39709.1 | GGUAGUUGGAGCUGGUGGC | 170 | GCCACCAGCUCCAACUACC | 597 |
| AD-39715.1 | GUAGUUGGAGCUGGUGGCG | 171 | CGCCACCAGCUCCAACUAC | 598 |
| AD-39721.1 | UAGUUGGAGCUGGUGGCGU | 172 | ACGCCACCAGCUCCAACUA | 599 |
| AD-39727.1 | AGUUGGAGCUGGUGGCGUA | 173 | UACGCCACCAGCUCCAACU | 600 |
| AD-39686.1 | GUUGGAGCUGGUGGCGUAG | 174 | CUACGCCACCAGCUCCAAC | 601 |
| AD-39692.1 | UUGGAGCUGGUGGCGUAGG | 175 | CCUACGCCACCAGCUCCAA | 602 |
| AD-39698.1 | UGGAGCUGGUGGCGUAGGC | 176 | GCCUACGCCACCAGCUCCA | 603 |
| AD-39704.1 | GGAGCUGGUGGCGUAGGCA | 177 | UGCCUACGCCACCAGCUCC | 604 |
| AD-39710.1 | GAGCUGGUGGCGUAGGCAA | 178 | UUGCCUACGCCACCAGCUC | 605 |
| AD-39716.1 | AGCUGGUGGCGUAGGCAAG | 179 | CUUGCCUACGCCACCAGCU | 606 |
| AD-39722.1 | GCUGGUGGCGUAGGCAAGA | 180 | UCUUGCCUACGCCACCAGC | 607 |
| AD-39728.1 | CUGGUGGCGUAGGCAAGAG | 181 | CUCUUGCCUACGCCACCAG | 608 |
| AD-39687.1 | UGGUGGCGUAGGCAAGAGU | 182 | ACUCUUGCCUACGCCACCA | 609 |
| AD-39693.1 | GGUGGCGUAGGCAAGAGUG | 183 | CACUCUUGCCUACGCCACC | 610 |
| AD-39699.1 | GUGGCGUAGGCAAGAGUGC | 184 | GCACUCUUGCCUACGCCAC | 611 |
| AD-39705.1 | UGGCGUAGGCAAGAGUGCC | 185 | GGCACUCUUGCCUACGCCA | 612 |
| AD-39711.1 | GGCGUAGGCAAGAGUGCCU | 186 | AGGCACUCUUGCCUACGCC | 613 |
| AD-39717.1 | GCGUAGGCAAGAGUGCCUU | 187 | AAGGCACUCUUGCCUACGC | 614 |
| AD-39723.1 | CGUAGGCAAGAGUGCCUUG | 188 | CAAGGCACUCUUGCCUACG | 615 |
| AD-39729.1 | GUAGGCAAGAGUGCCUUGA | 189 | UCAAGGCACUCUUGCCUAC | 616 |
| AD-39688.1 | UAGGCAAGAGUGCCUUGAC | 190 | GUCAAGGCACUCUUGCCUA | 617 |
| AD-39694.1 | AGGCAAGAGUGCCUUGACG | 191 | CGUCAAGGCACUCUUGCCU | 618 |
| AD-39700.1 | GGCAAGAGUGCCUUGACGA | 192 | UCGUCAAGGCACUCUUGCC | 619 |
| AD-39706.1 | GCAAGAGUGCCUUGACGAU | 193 | AUCGUCAAGGCACUCUUGC | 620 |
| AD-39712.1 | CAAGAGUGCCUUGACGAUA | 194 | UAUCGUCAAGGCACUCUUG | 621 |
| AD-39718.1 | AAGAGUGCCUUGACGAUAC | 195 | GUAUCGUCAAGGCACUCUU | 622 |
| AD-39724.1 | AGAGUGCCUUGACGAUACA | 196 | UGUAUCGUCAAGGCACUCU | 623 |
| AD-39730.1 | GAGUGCCUUGACGAUACAG | 197 | CUGUAUCGUCAAGGCACUC | 624 |
| AD-39736.1 | AGUGCCUUGACGAUACAGC | 198 | GCUGUAUCGUCAAGGCACU | 625 |
| AD-39742.1 | GUGCCUUGACGAUACAGCU | 199 | AGCUGUAUCGUCAAGGCAC | 626 |
| AD-39748.1 | UGCCUUGACGAUACAGCUA | 200 | UAGCUGUAUCGUCAAGGCA | 627 |
| AD-39754.1 | GCCUUGACGAUACAGCUAA | 201 | UUAGCUGUAUCGUCAAGGC | 628 |
| AD-39760.1 | CCUUGACGAUACAGCUAAU | 202 | AUUAGCUGUAUCGUCAAGG | 629 |
| AD-39766.1 | CUUGACGAUACAGCUAAUU | 203 | AAUUAGCUGUAUCGUCAAG | 630 |
| AD-39772.1 | UUGACGAUACAGCUAAUUC | 204 | GAAUUAGCUGUAUCGUCAA | 631 |
| AD-39731.1 | UGACGAUACAGCUAAUUCA | 205 | UGAAUUAGCUGUAUCGUCA | 632 |
| AD-39737.1 | GACGAUACAGCUAAUUCAG | 206 | CUGAAUUAGCUGUAUCGUC | 633 |
| AD-39743.1 | ACGAUACAGCUAAUUCAGA | 207 | UCUGAAUUAGCUGUAUCGU | 634 |
| AD-39749.1 | CGAUACAGCUAAUUCAGAA | 208 | UUCUGAAUUAGCUGUAUCG | 635 |
| AD-39755.1 | GAUACAGCUAAUUCAGAAU | 209 | AUUCUGAAUUAGCUGUAUC | 636 |
| AD-39761.1 | AUACAGCUAAUUCAGAAUC | 210 | GAUUCUGAAUUAGCUGUAU | 637 |
| AD-39767.1 | UACAGCUAAUUCAGAAUCA | 211 | UGAUUCUGAAUUAGCUGUA | 638 |
| AD-39773.1 | ACAGCUAAUUCAGAAUCAU | 212 | AUGAUUCUGAAUUAGCUGU | 639 |
| AD-39732.1 | CAGCUAAUUCAGAAUCAUU | 213 | AAUGAUUCUGAAUUAGCUG | 640 |
| AD-39738.1 | AGCUAAUUCAGAAUCAUUU | 214 | AAAUGAUUCUGAAUUAGCU | 641 |
| AD-39744.1 | GCUAAUUCAGAAUCAUUUU | 215 | AAAAUGAUUCUGAAUUAGC | 642 |
| AD-39750.1 | CUAAUUCAGAAUCAUUUUG | 216 | CAAAAUGAUUCUGAAUUAG | 643 |
| AD-39756.1 | UAAUUCAGAAUCAUUUUGU | 217 | ACAAAAUGAUUCUGAAUUA | 644 |
| AD-39762.1 | AAUUCAGAAUCAUUUUGUG | 218 | CACAAAAUGAUUCUGAAUU | 645 |
| AD-39768.1 | AUUCAGAAUCAUUUUGUGG | 219 | CCACAAAAUGAUUCUGAAU | 646 |
| AD-39774.1 | UUCAGAAUCAUUUUGUGGA | 220 | UCCACAAAAUGAUUCUGAA | 647 |
| AD-39733.1 | UCAGAAUCAUUUUGUGGAC | 221 | GUCCACAAAAUGAUUCUGA | 648 |
| AD-39739.1 | CAGAAUCAUUUUGUGGACG | 222 | CGUCCACAAAAUGAUUCUG | 649 |
| AD-39745.1 | AGAAUCAUUUUGUGGACGA | 223 | UCGUCCACAAAAUGAUUCU | 650 |
| AD-39751.1 | GAAUCAUUUUGUGGACGAA | 224 | UUCGUCCACAAAAUGAUUC | 651 |
| AD-39757.1 | AAUCAUUUUGUGGACGAAU | 225 | AUUCGUCCACAAAAUGAUU | 652 |
| AD-39763.1 | AUCAUUUUGUGGACGAAUA | 226 | UAUUCGUCCACAAAAUGAU | 653 |
| AD-39769.1 | UCAUUUUGUGGACGAAUAU | 227 | AUAUUCGUCCACAAAAUGA | 654 |
| AD-39775.1 | CAUUUUGUGGACGAAUAUG | 228 | CAUAUUCGUCCACAAAAUG | 655 |
| AD-39734.1 | AUUUUGUGGACGAAUAUGA | 229 | UCAUAUUCGUCCACAAAAU | 656 |
| AD-39740.1 | UUUUGUGGACGAAUAUGAU | 230 | AUCAUAUUCGUCCACAAAA | 657 |
| AD-39746.1 | UUUGUGGACGAAUAUGAUC | 231 | GAUCAUAUUCGUCCACAAA | 658 |
| AD-39752.1 | UUGUGGACGAAUAUGAUCC | 232 | GGAUCAUAUUCGUCCACAA | 659 |
| AD-39758.1 | UGUGGACGAAUAUGAUCCA | 233 | UGGAUCAUAUUCGUCCACA | 660 |
| AD-39764.1 | GUGGACGAAUAUGAUCCAA | 234 | UUGGAUCAUAUUCGUCCAC | 661 |
| AD-39770.1 | UGGACGAAUAUGAUCCAAC | 235 | GUUGGAUCAUAUUCGUCCA | 662 |
| AD-39776.1 | AGGAAGCAAGUAGUAAUUG | 236 | CAAUUACUACUUGCUUCCU | 663 |
| AD-39735.1 | GGAAGCAAGUAGUAAUUGA | 237 | UCAAUUACUACUUGCUUCC | 664 |
| AD-39741.1 | GAAGCAAGUAGUAAUUGAU | 238 | AUCAAUUACUACUUGCUUC | 665 |
| AD-39747.1 | AAGCAAGUAGUAAUUGAUG | 239 | CAUCAAUUACUACUUGCUU | 666 |
| AD-39753.1 | AGCAAGUAGUAAUUGAUGG | 240 | CCAUCAAUUACUACUUGCU | 667 |
| AD-39759.1 | GCAAGUAGUAAUUGAUGGA | 241 | UCCAUCAAUUACUACUUGC | 668 |
| AD-39765.1 | CAAGUAGUAAUUGAUGGAG | 242 | CUCCAUCAAUUACUACUUG | 669 |
| AD-39771.1 | AAGUAGUAAUUGAUGGAGA | 243 | UCUCCAUCAAUUACUACUU | 670 |
| AD-39778.1 | AGUAGUAAUUGAUGGAGAA | 244 | UUCUCCAUCAAUUACUACU | 671 |
| AD-39784.1 | GUAGUAAUUGAUGGAGAAA | 245 | UUUCUCCAUCAAUUACUAC | 672 |
| AD-39790.1 | UAGUAAUUGAUGGAGAAAC | 246 | GUUUCUCCAUCAAUUACUA | 673 |
| AD-39796.1 | AGUAAUUGAUGGAGAAACC | 247 | GGUUUCUCCAUCAAUUACU | 674 |
| AD-39802.1 | GUAAUUGAUGGAGAAACCU | 248 | AGGUUUCUCCAUCAAUUAC | 675 |
| AD-39808.1 | UAAUUGAUGGAGAAACCUG | 249 | CAGGUUUCUCCAUCAAUUA | 676 |
| AD-39814.1 | AAUUGAUGGAGAAACCUGU | 250 | ACAGGUUUCUCCAUCAAUU | 677 |
| AD-39820.1 | AUUGAUGGAGAAACCUGUC | 251 | GACAGGUUUCUCCAUCAAU | 678 |
| AD-39779.1 | UUGAUGGAGAAACCUGUCU | 252 | AGACAGGUUUCUCCAUCAA | 679 |
| AD-39785.1 | UGAUGGAGAAACCUGUCUC | 253 | GAGACAGGUUUCUCCAUCA | 680 |
| AD-39791.1 | GAUGGAGAAACCUGUCUCU | 254 | AGAGACAGGUUUCUCCAUC | 681 |
| AD-39797.1 | AUGGAGAAACCUGUCUCUU | 255 | AAGAGACAGGUUUCUCCAU | 682 |
| AD-39803.1 | UGGAGAAACCUGUCUCUUG | 256 | CAAGAGACAGGUUUCUCCA | 683 |
| AD-39809.1 | GGAGAAACCUGUCUCUUGG | 257 | CCAAGAGACAGGUUUCUCC | 684 |
| AD-39815.1 | GAGAAACCUGUCUCUUGGA | 258 | UCCAAGAGACAGGUUUCUC | 685 |
| AD-39821.1 | AGAAACCUGUCUCUUGGAU | 259 | AUCCAAGAGACAGGUUUCU | 686 |
| AD-39780.1 | GAAACCUGUCUCUUGGAUA | 260 | UAUCCAAGAGACAGGUUUC | 687 |
| AD-39786.1 | AAACCUGUCUCUUGGAUAU | 261 | AUAUCCAAGAGACAGGUUU | 688 |
| AD-39792.1 | AACCUGUCUCUUGGAUAUU | 262 | AAUAUCCAAGAGACAGGUU | 689 |
| AD-39798.1 | ACCUGUCUCUUGGAUAUUC | 263 | GAAUAUCCAAGAGACAGGU | 690 |
| AD-39804.1 | CCUGUCUCUUGGAUAUUCU | 264 | AGAAUAUCCAAGAGACAGG | 691 |
| AD-39810.1 | CUGUCUCUUGGAUAUUCUC | 265 | GAGAAUAUCCAAGAGACAG | 692 |
| AD-39816.1 | UGUCUCUUGGAUAUUCUCG | 266 | CGAGAAUAUCCAAGAGACA | 693 |
| AD-39822.1 | GUCUCUUGGAUAUUCUCGA | 267 | UCGAGAAUAUCCAAGAGAC | 694 |
| AD-39781.1 | UCUCUUGGAUAUUCUCGAC | 268 | GUCGAGAAUAUCCAAGAGA | 695 |
| AD-39787.1 | CUCUUGGAUAUUCUCGACA | 269 | UGUCGAGAAUAUCCAAGAG | 696 |
| AD-39793.1 | UCUUGGAUAUUCUCGACAC | 270 | GUGUCGAGAAUAUCCAAGA | 697 |
| AD-39799.1 | CUUGGAUAUUCUCGACACA | 271 | UGUGUCGAGAAUAUCCAAG | 698 |
| AD-39805.1 | AGUACAGUGCAAUGAGGGA | 272 | UCCCUCAUUGCACUGUACU | 699 |
| AD-39811.1 | GUACAGUGCAAUGAGGGAC | 273 | GUCCCUCAUUGCACUGUAC | 700 |
| AD-39817.1 | UACAGUGCAAUGAGGGACC | 274 | GGUCCCUCAUUGCACUGUA | 701 |
| AD-39823.1 | ACAGUGCAAUGAGGGACCA | 275 | UGGUCCCUCAUUGCACUGU | 702 |
| AD-39782.1 | CAGUGCAAUGAGGGACCAG | 276 | CUGGUCCCUCAUUGCACUG | 703 |
| AD-39788.1 | AGUGCAAUGAGGGACCAGU | 277 | ACUGGUCCCUCAUUGCACU | 704 |
| AD-39794.1 | GUGCAAUGAGGGACCAGUA | 278 | UACUGGUCCCUCAUUGCAC | 705 |
| AD-39800.1 | UGCAAUGAGGGACCAGUAC | 279 | GUACUGGUCCCUCAUUGCA | 706 |
| AD-39806.1 | GCAAUGAGGGACCAGUACA | 280 | UGUACUGGUCCCUCAUUGC | 707 |
| AD-39812.1 | CAAUGAGGGACCAGUACAU | 281 | AUGUACUGGUCCCUCAUUG | 708 |
| AD-39818.1 | AAUGAGGGACCAGUACAUG | 282 | CAUGUACUGGUCCCUCAUU | 709 |
| AD-39824.1 | AUGAGGGACCAGUACAUGA | 283 | UCAUGUACUGGUCCCUCAU | 710 |
| AD-39783.1 | UGAGGGACCAGUACAUGAG | 284 | CUCAUGUACUGGUCCCUCA | 711 |
| AD-39789.1 | GAGGGACCAGUACAUGAGG | 285 | CCUCAUGUACUGGUCCCUC | 712 |
| AD-39795.1 | AGGGACCAGUACAUGAGGA | 286 | UCCUCAUGUACUGGUCCCU | 713 |
| AD-39801.1 | GGGACCAGUACAUGAGGAC | 287 | GUCCUCAUGUACUGGUCCC | 714 |
| AD-39807.1 | GGACCAGUACAUGAGGACU | 288 | AGUCCUCAUGUACUGGUCC | 715 |
| AD-39813.1 | GACCAGUACAUGAGGACUG | 289 | CAGUCCUCAUGUACUGGUC | 716 |
| AD-39819.1 | ACCAGUACAUGAGGACUGG | 290 | CCAGUCCUCAUGUACUGGU | 717 |
| AD-39825.1 | CCAGUACAUGAGGACUGGG | 291 | CCCAGUCCUCAUGUACUGG | 718 |
| AD-39831.1 | CAGUACAUGAGGACUGGGG | 292 | CCCCAGUCCUCAUGUACUG | 719 |
| AD-39837.1 | AGUACAUGAGGACUGGGGA | 293 | UCCCCAGUCCUCAUGUACU | 720 |
| AD-39843.1 | GUACAUGAGGACUGGGGAG | 294 | CUCCCCAGUCCUCAUGUAC | 721 |
| AD-39849.1 | UACAUGAGGACUGGGGAGG | 295 | CCUCCCCAGUCCUCAUGUA | 722 |
| AD-39855.1 | ACAUGAGGACUGGGGAGGG | 296 | CCCUCCCCAGUCCUCAUGU | 723 |
| AD-39861.1 | CAUGAGGACUGGGGAGGGC | 297 | GCCCUCCCCAGUCCUCAUG | 724 |
| AD-39867.1 | AUGAGGACUGGGGAGGGCU | 298 | AGCCCUCCCCAGUCCUCAU | 725 |
| AD-39826.1 | UGAGGACUGGGGAGGGCUU | 299 | AAGCCCUCCCCAGUCCUCA | 726 |
| AD-39832.1 | GAGGACUGGGGAGGGCUUU | 300 | AAAGCCCUCCCCAGUCCUC | 727 |
| AD-39838.1 | AGGACUGGGGAGGGCUUUC | 301 | GAAAGCCCUCCCCAGUCCU | 728 |
| AD-39844.1 | GGACUGGGGAGGGCUUUCU | 302 | AGAAAGCCCUCCCCAGUCC | 729 |
| AD-39850.1 | GACUGGGGAGGGCUUUCUU | 303 | AAGAAAGCCCUCCCCAGUC | 730 |
| AD-39856.1 | ACUGGGGAGGGCUUUCUUU | 304 | AAAGAAAGCCCUCCCCAGU | 731 |
| AD-39862.1 | CUGGGGAGGGCUUUCUUUG | 305 | CAAAGAAAGCCCUCCCCAG | 732 |
| AD-39868.1 | UGGGGAGGGCUUUCUUUGU | 306 | ACAAAGAAAGCCCUCCCCA | 733 |
| AD-39827.1 | UUGCCAUAAAUAAUACUAA | 307 | UUAGUAUUAUUUAUGGCAA | 734 |
| AD-39833.1 | UGCCAUAAAUAAUACUAAA | 308 | UUUAGUAUUAUUUAUGGCA | 735 |
| AD-39839.1 | GCCAUAAAUAAUACUAAAU | 309 | AUUUAGUAUUAUUUAUGGC | 736 |
| AD-39845.1 | CCAUAAAUAAUACUAAAUC | 310 | GAUUUAGUAUUAUUUAUGG | 737 |
| AD-39851.1 | CAUAAAUAAUACUAAAUCA | 311 | UGAUUUAGUAUUAUUUAUG | 738 |
| AD-39857.1 | AUAAAUAAUACUAAAUCAU | 312 | AUGAUUUAGUAUUAUUUAU | 739 |
| AD-39863.1 | UAAAUAAUACUAAAUCAUU | 313 | AAUGAUUUAGUAUUAUUUA | 740 |
| AD-39869.1 | AAAUAAUACUAAAUCAUUU | 314 | AAAUGAUUUAGUAUUAUUU | 741 |
| AD-39828.1 | AAUAAUACUAAAUCAUUUG | 315 | CAAAUGAUUUAGUAUUAUU | 742 |
| AD-39834.1 | AUAAUACUAAAUCAUUUGA | 316 | UCAAAUGAUUUAGUAUUAU | 743 |
| AD-39840.1 | UAAUACUAAAUCAUUUGAA | 317 | UUCAAAUGAUUUAGUAUUA | 744 |
| AD-39846.1 | AAUACUAAAUCAUUUGAAG | 318 | CUUCAAAUGAUUUAGUAUU | 745 |
| AD-39852.1 | AUACUAAAUCAUUUGAAGA | 319 | UCUUCAAAUGAUUUAGUAU | 746 |
| AD-39858.1 | UACUAAAUCAUUUGAAGAU | 320 | AUCUUCAAAUGAUUUAGUA | 747 |
| AD-39864.1 | ACUAAAUCAUUUGAAGAUA | 321 | UAUCUUCAAAUGAUUUAGU | 748 |
| AD-39870.1 | CUAAAUCAUUUGAAGAUAU | 322 | AUAUCUUCAAAUGAUUUAG | 749 |
| AD-39829.1 | UAAAUCAUUUGAAGAUAUU | 323 | AAUAUCUUCAAAUGAUUUA | 750 |
| AD-39835.1 | AAAUCAUUUGAAGAUAUUC | 324 | GAAUAUCUUCAAAUGAUUU | 751 |
| AD-39841.1 | AAUCAUUUGAAGAUAUUCA | 325 | UGAAUAUCUUCAAAUGAUU | 752 |
| AD-39853.1 | UCAUUUGAAGAUAUUCACC | 326 | GGUGAAUAUCUUCAAAUGA | 753 |
| AD-39859.1 | CAUUUGAAGAUAUUCACCA | 327 | UGGUGAAUAUCUUCAAAUG | 754 |
| AD-39865.1 | AUUUGAAGAUAUUCACCAU | 328 | AUGGUGAAUAUCUUCAAAU | 755 |
| AD-39871.1 | UUUGAAGAUAUUCACCAUU | 329 | AAUGGUGAAUAUCUUCAAA | 756 |
| AD-39830.1 | UUGAAGAUAUUCACCAUUA | 330 | UAAUGGUGAAUAUCUUCAA | 757 |
| AD-39836.1 | GAGAACAAAUUAAAAGAGU | 331 | ACUCUUUUAAUUUGUUCUC | 758 |
| AD-39842.1 | AGAACAAAUUAAAAGAGUU | 332 | AACUCUUUUAAUUUGUUCU | 759 |
| AD-39848.1 | GAACAAAUUAAAAGAGUUA | 333 | UAACUCUUUUAAUUUGUUC | 760 |
| AD-39854.1 | AACAAAUUAAAAGAGUUAA | 334 | UUAACUCUUUUAAUUUGUU | 761 |
| AD-39860.1 | ACAAAUUAAAAGAGUUAAG | 335 | CUUAACUCUUUUAAUUUGU | 762 |
| AD-39866.1 | CAAAUUAAAAGAGUUAAGG | 336 | CCUUAACUCUUUUAAUUUG | 763 |
| AD-39992.1 | AAAUUAAAAGAGUUAAGGA | 337 | UCCUUAACUCUUUUAAUUU | 764 |
| AD-39998.1 | AAUUAAAAGAGUUAAGGAC | 338 | GUCCUUAACUCUUUUAAUU | 765 |
| AD-40004.1 | AUUAAAAGAGUUAAGGACU | 339 | AGUCCUUAACUCUUUUAAU | 766 |
| AD-40010.1 | UUAAAAGAGUUAAGGACUC | 340 | GAGUCCUUAACUCUUUUAA | 767 |
| AD-40016.1 | UAAAAGAGUUAAGGACUCU | 341 | AGAGUCCUUAACUCUUUUA | 768 |
| AD-40022.1 | AAAAGAGUUAAGGACUCUG | 342 | CAGAGUCCUUAACUCUUUU | 769 |
| AD-40028.1 | AAAGAGUUAAGGACUCUGA | 343 | UCAGAGUCCUUAACUCUUU | 770 |
| AD-40034.1 | AAGAGUUAAGGACUCUGAA | 344 | UUCAGAGUCCUUAACUCUU | 771 |
| AD-39999.1 | GAGUUAAGGACUCUGAAGA | 345 | UCUUCAGAGUCCUUAACUC | 772 |
| AD-40005.1 | AGUUAAGGACUCUGAAGAU | 346 | AUCUUCAGAGUCCUUAACU | 773 |
| AD-40011.1 | GUUAAGGACUCUGAAGAUG | 347 | CAUCUUCAGAGUCCUUAAC | 774 |
| AD-40017.1 | UUAAGGACUCUGAAGAUGU | 348 | ACAUCUUCAGAGUCCUUAA | 775 |
| AD-40029.1 | AAGGACUCUGAAGAUGUAC | 349 | GUACAUCUUCAGAGUCCUU | 776 |
| AD-40035.1 | AGGACUCUGAAGAUGUACC | 350 | GGUACAUCUUCAGAGUCCU | 777 |
| AD-39994.1 | GGACUCUGAAGAUGUACCU | 351 | AGGUACAUCUUCAGAGUCC | 778 |
| AD-40000.1 | GACUCUGAAGAUGUACCUA | 352 | UAGGUACAUCUUCAGAGUC | 779 |
| AD-40006.1 | ACUCUGAAGAUGUACCUAU | 353 | AUAGGUACAUCUUCAGAGU | 780 |
| AD-40012.1 | CUCUGAAGAUGUACCUAUG | 354 | CAUAGGUACAUCUUCAGAG | 781 |
| AD-40018.1 | UCUGAAGAUGUACCUAUGG | 355 | CCAUAGGUACAUCUUCAGA | 782 |
| AD-40024.1 | CUGAAGAUGUACCUAUGGU | 356 | ACCAUAGGUACAUCUUCAG | 783 |
| AD-40030.1 | UGAAGAUGUACCUAUGGUC | 357 | GACCAUAGGUACAUCUUCA | 784 |
| AD-40036.1 | GUAGGAAAUAAAUGUGAUU | 358 | AAUCACAUUUAUUUCCUAC | 785 |
| AD-39995.1 | UAGGAAAUAAAUGUGAUUU | 359 | AAAUCACAUUUAUUUCCUA | 786 |
| AD-40001.1 | AGGAAAUAAAUGUGAUUUG | 360 | CAAAUCACAUUUAUUUCCU | 787 |
| AD-40007.1 | GGAAAUAAAUGUGAUUUGC | 361 | GCAAAUCACAUUUAUUUCC | 788 |
| AD-40013.1 | GAAAUAAAUGUGAUUUGCC | 362 | GGCAAAUCACAUUUAUUUC | 789 |
| AD-40019.1 | AAAUAAAUGUGAUUUGCCU | 363 | AGGCAAAUCACAUUUAUUU | 790 |
| AD-40025.1 | AAUAAAUGUGAUUUGCCUU | 364 | AAGGCAAAUCACAUUUAUU | 791 |
| AD-40031.1 | AUAAAUGUGAUUUGCCUUC | 365 | GAAGGCAAAUCACAUUUAU | 792 |
| AD-40037.1 | UAAAUGUGAUUUGCCUUCU | 366 | AGAAGGCAAAUCACAUUUA | 793 |
| AD-39996.1 | AAAUGUGAUUUGCCUUCUA | 367 | UAGAAGGCAAAUCACAUUU | 794 |
| AD-40002.1 | AAUGUGAUUUGCCUUCUAG | 368 | CUAGAAGGCAAAUCACAUU | 795 |
| AD-40008.1 | AUGUGAUUUGCCUUCUAGA | 369 | UCUAGAAGGCAAAUCACAU | 796 |
| AD-40014.1 | UGUGAUUUGCCUUCUAGAA | 370 | UUCUAGAAGGCAAAUCACA | 797 |
| AD-40020.1 | GUGAUUUGCCUUCUAGAAC | 371 | GUUCUAGAAGGCAAAUCAC | 798 |
| AD-40026.1 | UGAUUUGCCUUCUAGAACA | 372 | UGUUCUAGAAGGCAAAUCA | 799 |
| AD-40032.1 | GAUUUGCCUUCUAGAACAG | 373 | CUGUUCUAGAAGGCAAAUC | 800 |
| AD-40038.1 | AUUUGCCUUCUAGAACAGU | 374 | ACUGUUCUAGAAGGCAAAU | 801 |
| AD-39997.1 | UUUGCCUUCUAGAACAGUA | 375 | UACUGUUCUAGAAGGCAAA | 802 |
| AD-40009.1 | UGCCUUCUAGAACAGUAGA | 376 | UCUACUGUUCUAGAAGGCA | 803 |
| AD-40015.1 | GCCUUCUAGAACAGUAGAC | 377 | GUCUACUGUUCUAGAAGGC | 804 |
| AD-40021.1 | CCUUCUAGAACAGUAGACA | 378 | UGUCUACUGUUCUAGAAGG | 805 |
| AD-40027.1 | CUUCUAGAACAGUAGACAC | 379 | GUGUCUACUGUUCUAGAAG | 806 |
| AD-40033.1 | UUCUAGAACAGUAGACACA | 380 | UGUGUCUACUGUUCUAGAA | 807 |
| AD-40039.1 | UCUAGAACAGUAGACACAA | 381 | UUGUGUCUACUGUUCUAGA | 808 |
| AD-40045.1 | CUAGAACAGUAGACACAAA | 382 | UUUGUGUCUACUGUUCUAG | 809 |
| AD-40051.1 | UAGAACAGUAGACACAAAA | 383 | UUUUGUGUCUACUGUUCUA | 810 |
| AD-40057.1 | AGAACAGUAGACACAAAAC | 384 | GUUUUGUGUCUACUGUUCU | 811 |
| AD-40063.1 | GAACAGUAGACACAAAACA | 385 | UGUUUUGUGUCUACUGUUC | 812 |
| AD-40069.1 | AACAGUAGACACAAAACAG | 386 | CUGUUUUGUGUCUACUGUU | 813 |
| AD-40075.1 | ACAGUAGACACAAAACAGG | 387 | CCUGUUUUGUGUCUACUGU | 814 |
| AD-40081.1 | CAGUAGACACAAAACAGGC | 388 | GCCUGUUUUGUGUCUACUG | 815 |
| AD-40040.1 | AGUAGACACAAAACAGGCU | 389 | AGCCUGUUUUGUGUCUACU | 816 |
| AD-40046.1 | GUAGACACAAAACAGGCUC | 390 | GAGCCUGUUUUGUGUCUAC | 817 |
| AD-40052.1 | UAGACACAAAACAGGCUCA | 391 | UGAGCCUGUUUUGUGUCUA | 818 |
| AD-40058.1 | AGACACAAAACAGGCUCAG | 392 | CUGAGCCUGUUUUGUGUCU | 819 |
| AD-40064.1 | GACACAAAACAGGCUCAGG | 393 | CCUGAGCCUGUUUUGUGUC | 820 |
| AD-40070.1 | ACACAAAACAGGCUCAGGA | 394 | UCCUGAGCCUGUUUUGUGU | 821 |
| AD-40076.1 | CACAAAACAGGCUCAGGAC | 395 | GUCCUGAGCCUGUUUUGUG | 822 |
| AD-40082.1 | ACAAAACAGGCUCAGGACU | 396 | AGUCCUGAGCCUGUUUUGU | 823 |
| AD-40041.1 | CAAAACAGGCUCAGGACUU | 397 | AAGUCCUGAGCCUGUUUUG | 824 |
| AD-40047.1 | AAAACAGGCUCAGGACUUA | 398 | UAAGUCCUGAGCCUGUUUU | 825 |
| AD-40053.1 | AAACAGGCUCAGGACUUAG | 399 | CUAAGUCCUGAGCCUGUUU | 826 |
| AD-40059.1 | AACAGGCUCAGGACUUAGC | 400 | GCUAAGUCCUGAGCCUGUU | 827 |
| AD-40065.1 | ACAGGCUCAGGACUUAGCA | 401 | UGCUAAGUCCUGAGCCUGU | 828 |
| AD-40071.1 | CAGGCUCAGGACUUAGCAA | 402 | UUGCUAAGUCCUGAGCCUG | 829 |
| AD-40077.1 | AGGCUCAGGACUUAGCAAG | 403 | CUUGCUAAGUCCUGAGCCU | 830 |
| AD-40083.1 | GGCUCAGGACUUAGCAAGA | 404 | UCUUGCUAAGUCCUGAGCC | 831 |
| AD-40042.1 | GCUCAGGACUUAGCAAGAA | 405 | UUCUUGCUAAGUCCUGAGC | 832 |
| AD-40048.1 | CUCAGGACUUAGCAAGAAG | 406 | CUUCUUGCUAAGUCCUGAG | 833 |
| AD-40054.1 | UCAGGACUUAGCAAGAAGU | 407 | ACUUCUUGCUAAGUCCUGA | 834 |
| AD-40060.1 | CAGGACUUAGCAAGAAGUU | 408 | AACUUCUUGCUAAGUCCUG | 835 |
| AD-40066.1 | AGGACUUAGCAAGAAGUUA | 409 | UAACUUCUUGCUAAGUCCU | 836 |
| AD-40072.1 | GGACUUAGCAAGAAGUUAU | 410 | AUAACUUCUUGCUAAGUCC | 837 |
| AD-40078.1 | GACUUAGCAAGAAGUUAUG | 411 | CAUAACUUCUUGCUAAGUC | 838 |
| AD-40084.1 | ACUUAGCAAGAAGUUAUGG | 412 | CCAUAACUUCUUGCUAAGU | 839 |
| AD-40043.1 | CUUAGCAAGAAGUUAUGGA | 413 | UCCAUAACUUCUUGCUAAG | 840 |
| AD-40049.1 | UUAGCAAGAAGUUAUGGAA | 414 | UUCCAUAACUUCUUGCUAA | 841 |
| AD-40055.1 | UAGCAAGAAGUUAUGGAAU | 415 | AUUCCAUAACUUCUUGCUA | 842 |
| AD-40061.1 | AGCAAGAAGUUAUGGAAUU | 416 | AAUUCCAUAACUUCUUGCU | 843 |
| AD-40067.1 | GCAAGAAGUUAUGGAAUUC | 417 | GAAUUCCAUAACUUCUUGC | 844 |
| AD-40073.1 | CAAGAAGUUAUGGAAUUCC | 418 | GGAAUUCCAUAACUUCUUG | 845 |
| AD-40079.1 | AAGAAGUUAUGGAAUUCCU | 419 | AGGAAUUCCAUAACUUCUU | 846 |
| AD-40085.1 | AGAAGUUAUGGAAUUCCUU | 420 | AAGGAAUUCCAUAACUUCU | 847 |
| AD-40044.1 | GAAGUUAUGGAAUUCCUUU | 421 | AAAGGAAUUCCAUAACUUC | 848 |
| AD-40050.1 | AAGUUAUGGAAUUCCUUUU | 422 | AAAAGGAAUUCCAUAACUU | 849 |
| AD-40056.1 | AGUUAUGGAAUUCCUUUUA | 423 | UAAAAGGAAUUCCAUAACU | 850 |
| AD-40062.1 | GUUAUGGAAUUCCUUUUAU | 424 | AUAAAAGGAAUUCCAUAAC | 851 |
| AD-40068.1 | UUAUGGAAUUCCUUUUAUU | 425 | AAUAAAAGGAAUUCCAUAA | 852 |
| AD-40074.1 | UAUGGAAUUCCUUUUAUUG | 426 | CAAUAAAAGGAAUUCCAUA | 853 |
| AD-40080.1 | AUGGAAUUCCUUUUAUUGA | 427 | UCAAUAAAAGGAAUUCCAU | 854 |
| AD-39720.1 | ACTTGTGGTAGTTGGAGCT | 1716 | AGCTCCAACTACCACAAGT | 1754 |
| AD-39706.1 | GCAAGAGTGCCTTGACGAT | 1717 | ATCGTCAAGGCACTCTTGC | 1755 |
| AD-39712.1 | CAAGAGTGCCTTGACGATA | 1718 | TATCGTCAAGGCACTCTTG | 1756 |
| AD-39760.1 | CCTTGACGATACAGCTAAT | 1719 | ATTAGCTGTATCGTCAAGG | 1757 |
| AD-39732.1 | CAGCTAATTCAGAATCATT | 1720 | AATGATTCTGAATTAGCTG | 1758 |
| AD-35541.4 | CGAATATGATCCAACAATA | 1721 | TATTGTTGGATCATATTCG | 1759 |
| AD-39735.1 | GGAAGCAAGTAGTAATTGA | 1722 | TCAATTACTACTTGCTTCC | 1760 |
| or hs_KRAS_ | | | | |
| 321_A22S26 | | | | |
| AD-39741.1 | GAAGCAAGTAGTAATTGAT | 1723 | ATCAATTACTACTTGCTTC | 1761 |
| or hs_KRAS_ | | | | |
| 322_A22S26 | | | | |
| AD-39778.1 | AGTAGTAATTGATGGAGAA | 1724 | TTCTCCATCAATTACTACT | 1762 |
| AD-39790.1 | TAGTAATTGATGGAGAAAC | 1725 | GTTTCTCCATCAATTACTA | 1763 |
| AD-39822.1 | GTCTCTTGGATATTCTCGA | 1726 | TCGAGAATATCCAAGAGAC | 1764 |
| AD-35609.4 | GGGCTTTCTTTGTGTATTT | 1727 | AAATACACAAAGAAAGCCC | 1765 |
| AD-35581.4 | GTGTATTTGCCATAAATAA | 1728 | TTATTTATGGCAAATACAC | 1766 |
| AD-39845.1 | CCATAAATAATACTAAATC | 1729 | GATTTAGTATTATTTATGG | 1767 |
| AD-39858.1 | TACTAAATCATTTGAAGAT | 1730 | ATCTTCAAATGATTTAGTA | 1768 |
| AD-39870.1 | CTAAATCATTTGAAGATAT | 1731 | ATATCTTCAAATGATTTAG | 1769 |
| AD-35576.4 | GAAGATATTCACCATTATA | 1732 | TATAATGGTGAATATCTTC | 1770 |
| AD-35588.4 | AGATATTCACCATTATAGA | 1733 | TCTATAATGGTGAATATCT | 1771 |
| AD-35600.1 | ATATTCACCATTATAGAGA | 1734 | TCTCTATAATGGTGAATAT | 1772 |
| AD-35606.1 | TATTCACCATTATAGAGAA | 1735 | TTCTCTATAATGGTGAATA | 1773 |
| AD-38151.1 | CATTATAGAGAACAAATTA | 1736 | TAATTTGTTCTCTATAATG | 1774 |
| AD-38163.1 | TTATAGAGAACAAATTAAA | 1737 | TTTAATTTGTTCTCTATAA | 1775 |
| AD-39999.1 | GAGTTAAGGACTCTGAAGA | 1738 | TCTTCAGAGTCCTTAACTC | 1776 |
| AD-38159.1 | CTATGGTCCTAGTAGGAAA | 1739 | TTTCCTACTAGGACCATAG | 1777 |
| or hs KRAS_ | | | | |
| 528_A22S26 | | | | |
| AD-38130.1 | TGGTCCTAGTAGGAAATAA | 1740 | TTATTTCCTACTAGGACCA | 1778 |
| or hs KRAS_ | | | | |
| 531_A22S26 | | | | |
| AD-38136.1 | GGTCCTAGTAGGAAATAAA | 1741 | TTTATTTCCTACTAGGACC | 1779 |
| AD-40036.1 | GTAGGAAATAAATGTGATT | 1742 | AATCACATTTATTTCCTAC | 1780 |
| AD-40008.1 | ATGTGATTTGCCTTCTAGA | 1743 | TCTAGAAGGCAAATCACAT | 1781 |
| AD-40021.1 | CCTTCTAGAACAGTAGACA | 1744 | TGTCTACTGTTCTAGAAGG | 1782 |
| AD-40077.1 | AGGCTCAGGACTTAGCAAG | 1745 | CTTGCTAAGTCCTGAGCCT | 1783 |
| AD-40072.1 | GGACTTAGCAAGAAGTTAT | 1746 | ATAACTTCTTGCTAAGTCC | 1784 |
| AD-40061.1 | AGCAAGAAGTTATGGAATT | 1747 | AATTCCATAACTTCTTGCT | 1785 |
| AD-40068.1 | TTATGGAATTCCTTTTATT | 1748 | AATAAAAGGAATTCCATAA | 1786 |
| AD-38131.1 | GGAATTCCTTTTATTGAAA | 1749 | TTTCAATAAAAGGAATTCC | 1787 |
| AD-38167.1 | CCTTTTATTGAAACATCAG | 1750 | CTGATGTTTCAATAAAAGG | 1788 |
| hs_KRAS | CCTGATGAATGTAAAGTTA | 1751 | TAACTTTACATTCATCAGG | 1789 |
| 1273_A22S26 | | | | |
| hs_KRAS | GGAGAATTTAATAAAGATA | 1752 | TATCTTTATTAAATTCTCC | 1790 |
| 2892_A37S26 | | | | |
| hs_KRAS | GAATAGTCATAACTAGATT | 1753 | AATCTAGTTATGACTATTC | 1791 |
| 4731_A22S26 | | | | |

TABLE 3
KRAS duplexes with modified sequences

| | | SEQ ID | | SEQ ID |
|---|---|---|---|---|
| Duplex | Sense Sequence | NO: | Anti-sense Sequence | NO: |
| AD-35523.3 | GGAcGAAuAuGAuccAAcAdTdT | 855 | UGUUGGAUcAuAUUCGUCCdTdT | 1282 |
| AD-35529.1 | GAcGAAuAuGAuccAAcAAdTdT | 856 | UUGUUGGAUcAuAUUCGUCdTdT | 1283 |
| AD-35535.4 | AcGAAuAuGAuccAAcAAudTdT | 857 | AUUGUUGGAUcAuAUUCGUdTdT | 1284 |
| AD-35541.4 | cGAAuAuGAuccAAcAAuAdTdT | 858 | uAUUGUUGGAUcAuAUUCGdTdT | 1285 |
| AD-35547.4 | GAAuAuGAuccAAcAAuAGdTdT | 859 | CuAUUGUUGGAUcAuAUUCdTdT | 1286 |
| AD-35553.4 | AAuAuGAuccAAcAAuAGAdTdT | 860 | UCuAUUGUUGGAUcAuAUUdTdT | 1287 |
| AD-35559.4 | AuAuGAuccAAcAAuAGAGdTdT | 861 | CUCuAUUGUUGGAUcAuAUdTdT | 1288 |
| AD-35565.4 | uAuGAuccAAcAAuAGAGGdTdT | 862 | CCUCuAUUGUUGGAUcAuAdTdT | 1289 |
| AD-35524.4 | AuGAuccAAcAAuAGAGGAdTdT | 863 | UCCUCuAUUGUUGGAUcAUdTdT | 1290 |
| AD-35530.4 | uGAuccAAcAAuAGAGGAudTdT | 864 | AUCCUCuAUUGUUGGAUcAdTdT | 1291 |
| AD-35536.4 | GAuccAAcAAuAGAGGAuudTdT | 865 | AAUCCUCuAUUGUUGGAUCdTdT | 1292 |
| AD-35542.4 | AuccAAcAAuAGAGGAuucdTdT | 866 | GAAUCCUCuAUUGUUGGAUdTdT | 1293 |
| AD-35548.4 | uccLAcAAuAGAGGAuuccdTdT | 867 | GGAAUCCUCuAUUGUUGGAdTdT | 1294 |
| AD-35554.4 | ccAAcAAuAGAGGAuuccudTdT | 868 | AGGAAUCCUCuAUUGUUGGdTdT | 1295 |
| AD-35560.2 | cAAcAAuAGAGGAuuccuAdTdT | 869 | uAGGAAUCCUCuAUUGUUGdTdT | 1296 |
| AD-35566.4 | AAcAAuAGAGGAuuccuAcdTdT | 870 | GuAGGAAUCCUCuAUUGUUdTdT | 1297 |
| AD-35525.2 | AcAAuAGAGGAuuccuAcAdTdT | 871 | UGuAGGAAUCCUCuAUUGUdTdT | 1298 |
| AD-35531.4 | cAAuAGAGGAuuccuAcAGdTdT | 872 | CUGuAGGAAUCCUCuAUUGdTdT | 1299 |
| AD-35537.4 | AAuAGAGGAuuccuAcAGGdTdT | 873 | CCUGuAGGAAUCCUCuAUUdTdT | 1300 |
| AD-35543.2 | AuAGAGGAuuccuAcAGGAdTdT | 874 | UCCUGuAGGAAUCCUCuAUdTdT | 1301 |
| AD-35549.4 | uAGAGGAuuccuAcAGGAAdTdT | 875 | UUCCUGuAGGAAUCCUCuAdTdT | 1302 |
| AD-35555.4 | AGAGGAuuccuAcAGGAAGdTdT | 876 | CUUCCUGuAGGAAUCCUCUdTdT | 1303 |
| AD-35561.4 | GAGGAuuccuAcAGGAAGcdTdT | 877 | GCUUCCUGuAGGAAUCCUCdTdT | 1304 |
| AD-35567.4 | AGGAuuccuAcAGGAAGcAdTdT | 878 | UGCUUCCUGuAGGAAUCCUdTdT | 1305 |
| AD-35526.4 | GGAuuccuAcAGGAAGcAAdTdT | 879 | UUGCUUCCUGuAGGAAUCCdTdT | 1306 |
| AD-35532.4 | GAuuccuAcAGGAAGcAAGdTdT | 880 | CUUGCUUCCUGuAGGAAUCdTdT | 1307 |
| AD-35538.4 | AuuccuAcAGGAAGcAAGudTdT | 881 | ACUUGCUUCCUGuAGGAAUdTdT | 1308 |
| AD-35544.4 | uuccuAcAGGAAGcAAGuAdTdT | 882 | uACUUGCUUCCUGuAGGAAdTdT | 1309 |
| AD-35550.4 | uccuAcAGGAAGcAAGuAGdTdT | 883 | CuACUUGCUUCCUGuAGGAdTdT | 1310 |
| AD-35556.4 | ccuAcAGGAAGcAAGuAGudTdT | 884 | ACuACUUGCUUCCUGuAGGdTdT | 1311 |
| AD-35562.4 | cuAcAGGAAGcAAGuAGuAdTdT | 885 | uACuACUUGCUUCCUGuAGdTdT | 1312 |
| AD-35568.4 | uAcAGGAAGcAAGuAGuAAdTdT | 886 | UuACuACUUGCUUCCUGuAdTdT | 1313 |
| AD-35527.4 | AcAGGAAGcAAGuAGuAAudTdT | 887 | AUuACuACUUGCUUCCUGUdTdT | 1314 |
| AD-35533.4 | cAGGAAGcAAGuAGuAAuudTdT | 888 | AAUuACuACUUGCUUCCUGdTdT | 1315 |
| AD-35539.4 | uuGGAuAuucucGAcAcAGdTdT | 889 | CUGUGUCGAGAAuAUCcAAdTdT | 1316 |
| AD-35545.4 | uGGAuAuucucGAaAcAGcdTdT | 890 | GCUGUGUCGAGAAuAUCcAdTdT | 1317 |
| AD-35551.4 | GGAuAuucucGAcAcAGcAdTdT | 891 | UGCUGUGUCGAGAAuAUCCdTdT | 1318 |
| AD-35563.4 | AuAuucucGAcAcAGcAGGdTdT | 892 | CCUGCUGUGUCGAGAAuAUdTdT | 1319 |
| AD-35528.4 | AuucucGAcAcAGcAGGucdTdT | 893 | GACCUGCUGUGUCGAGAAUdTdT | 1320 |
| AD-35540.4 | ucucGAcAcAGcAGGucAAdTdT | 894 | UUGACCUGCUGUGUCGAGAdTdT | 1321 |
| AD-35546.4 | cucGAcAcAGcAGGucAAGdTdT | 895 | CUUGACCUGCUGUGUCGAGdTdT | 1322 |
| AD-35552.4 | ucGAcAcAGcAGGucAAGAdTdT | 896 | UCUUGACCUGCUGUGUCGAdTdT | 1323 |
| AD-35558.4 | cGAcAcAGcAGGucAAGAGdTdT | 897 | CUCUUGACCUGCUGUGUCGdTdT | 1324 |
| AD-35564.4 | GAcAcAGcAGGucAAGAGGdTdT | 898 | CCUCUUGACCUGCUGUGUCdTdT | 1325 |
| AD-35570.4 | AcAcAGcAGGucAAGAGGAdTdT | 899 | UCCUCUUGACCUGCUGUGUdTdT | 1326 |
| AD-35571.4 | aAcAGcAGGucAAGAGGAGdTdT | 900 | CUCCUCUUGACCUGCUGUGdTdT | 1327 |
| AD-35577.4 | AcAGcAGGucAAGAGGAGudTdT | 901 | ACUCCUCUUGACCUGCUGUdTdT | 1328 |
| AD-35583.4 | aAGcAGGucAAGAGGAGuAdTdT | 902 | uACUCCUCUUGACCUGCUGdTdT | 1329 |
| AD-35589.4 | AGcAGGucAAGAGGAGuAcdTdT | 903 | GuACUCCUCUUGACCUGCUdTdT | 1330 |
| AD-35595.4 | GcAGGucAAGAGGAGuAcAdTdT | 904 | UGuACUCCUCUUGACCUGCdTdT | 1331 |
| AD-35601.4 | cAGGucAAGAGGAGuAcAGdTdT | 905 | CUGuACUCCUCUUGACCUGdTdT | 1332 |
| AD-35607.4 | AGGucAAGAGGAGuAcAGudTdT | 906 | ACUGuACUCCUCUUGACCUdTdT | 1333 |
| AD-35613.4 | GGucAAGAGGAGuAcAGuGdTdT | 907 | cACUGuACUCCUCUUGACCdTdT | 1334 |
| AD-35572.4 | GucAAGAGGAGuAcAGuGcdTdT | 908 | GcACUGuACUCCUCUUGACdTdT | 1335 |
| AD-35578.4 | ucAAGAGGAGuAcAGuGcAdTdT | 909 | UGcACUGuACUCCUCUUGAdTdT | 1336 |
| AD-35584.4 | cAAGAGGAGuAcAGuGcAAdTdT | 910 | UUGcACUGuACUCCUCUUGdTdT | 1337 |
| AD-35590.4 | AAGAGGAGuAcAGuGcAAudTdT | 911 | AUUGcACUGuACUCCUCUUdTdT | 1338 |
| AD-35596.4 | AGAGGAGuAcAGuGcAAuGdTdT | 912 | cAUUGcACUGuACUCCUCUdTdT | 1339 |
| AD-35602.4 | GAGGAGuAcAGuGcAAuGAdTdT | 913 | UcAUUGcACUGuACUCCUCdTdT | 1340 |
| AD-35608.4 | AGGAGuAcAGuGcAAuGAGdTdT | 914 | CUcAUUGcACUGuACUCCUdTdT | 1341 |
| AD-35614.4 | GGAGuAcAGuGcAAuGAGGdTdT | 915 | CCUcAUUGcACUGuACUCCdTdT | 1342 |
| AD-35573.4 | GAGuAcAGuGcAAuGAGGGdTdT | 916 | CCCUcAUUGcACUGuACUCdTdT | 1343 |
| AD-35579.4 | GGGGAGGGcuuucuuuGuGdTdT | 917 | cAcAAAGAAAGCCCUCCCCdTdT | 1344 |
| AD-35585.4 | GGGAGGGcuuucuuuGuGudTdT | 918 | AcAcAAAGAAAGCCCUCCCdTdT | 1345 |
| AD-35591.4 | GGAGGGcuuucuuuGuGuAdTdT | 919 | uAcAcAAAGAAAGCCCUCCdTdT | 1346 |
| AD-35597.4 | GAGGGcuuucuuuGuGuAudTdT | 920 | AuAcAcAAAGAAAGCCCUCdTdT | 1347 |
| AD-35603.4 | AGGGcuuucuuuGuGuAuudTdT | 921 | AAuAcAcAAAGAAAGCCCUdTdT | 1348 |
| AD-35609.4 | GGGcuuucuuuGuGuAuuudTdT | 922 | AAAuAcAcAAAGAAAGCCCdTdT | 1349 |
| AD-35615.4 | GGcuuucuuuGuGuAuuuGdTdT | 923 | cAAAuAcAcAAAGAAAGCCdTdT | 1350 |
| AD-35574.4 | GcuuucuuuGuGuAuuuGcdTdT | 924 | GcAAAuAcAcAAAGAAAGCdTdT | 1351 |
| AD-35580.1 | cuuucuuuGuGuAuuuGccdTdT | 925 | GGcAAAuAcAcAAAGAAAGdTdT | 1352 |
| AD-35586.4 | uuucuuuGuGuAuuuGccAdTdT | 926 | UGGcAAAuAcAcAAAGAAAdTdT | 1353 |
| AD-35592.4 | uucuuuGuGuAuuuGccAudTdT | 927 | AUGGcAAAuAcAcAAAGAAdTdT | 1354 |
| AD-35598.4 | ucuuuGuGuAuuuGccAuAdTdT | 928 | uAUGGcAAAuAcAcAAAGAdTdT | 1355 |
| AD-35604.4 | cuuuGuGuAuuuGccAuAAdTdT | 929 | UuAUGGcAAAuAcAcAAAGdTdT | 1356 |
| AD-35610.4 | uuuGuGuAuuuGccAuAAAdTdT | 930 | UUuAUGGcAAAuAcAcAAAdTdT | 1357 |
| AD-35616.4 | uuGuGuAuuuGccAuAAAudTdT | 931 | AUUuAUGGcAAAuAcAcAAdTdT | 1358 |
| AD-35575.4 | uGuGuAuuuGccAuAAAuAdTdT | 932 | uAUUuAUGGcAAAuAcAcAdTdT | 1359 |
| AD-35581.4 | GuGuAuuuGccAuAAAuAAdTdT | 933 | UuAUUuAUGGcAAAuAcACdTdT | 1360 |
| AD-35587.4 | uGuAuuuGccAuAAAuAAudTdT | 934 | AUuAUUuAUGGcAAAuAcAdTdT | 1361 |
| AD-35593.4 | GuAuuuGccAuAAAuAAuAdTdT | 935 | uAUuAUUuAUGGcAAAuACdTdT | 1362 |
| AD-35599.4 | uAuuuGccAuAAAuAAuAcdTdT | 936 | GuAUuAUUuAUGGcAAAuAdTdT | 1363 |
| AD-35605.4 | AuuuGccAuAAAuAAuAcudTdT | 937 | AGuAUuAUUuAUGGcAAAUdTdT | 1364 |
| AD-35611.4 | uuuGccAuAAAuAAuAcuAdTdT | 938 | uAGuAUuAUUuAUGGcAAAdTdT | 1365 |
| AD-35617.4 | uGAAGAuAuucAccAuuAudTdT | 939 | AuAAUGGUGAAuAUCUUcAdTdT | 1366 |
| AD-35576.4 | GAAGAuAuucAccAuuAuAdTdT | 940 | uAuAAUGGUGAAuAUCUUCdTdT | 1367 |
| AD-35588.4 | AGAuAuucAccAuuAuAGAdTdT | 941 | UCuAuAAUGGUGAAuAUCUdTdT | 1368 |
| AD-35667.1 | AAAcAucAGcAAAGAcAAGdTdT | 942 | CUUGUCUUUGCUGAUGUUUdTdT | 1369 |
| AD-35673.1 | AAcAucAGcAAAGAcAAGAdTdT | 943 | UCUUGUCUUUGCUGAUGUUdTdT | 1370 |
| AD-35679.1 | AcAucAGcAAAGAcAAGAcdTdT | 944 | GUCUUGUCUUUGCUGAUGUdTdT | 1371 |
| AD-35685.1 | cAucAGcAAAGAcAAGAcAdTdT | 945 | UGUCUUGUCUUUGCUGAUGdTdT | 1372 |
| AD-35691.1 | AucAGcAAAGAcAAGAcAGdTdT | 946 | CUGUCUUGUCUUUGCUGAUdTdT | 1373 |
| AD-35557.1 | GAuAuucucGAcAcAGcAGdTdT | 947 | CUGCUGUGUCGAGAAuAUCdTdT | 1374 |
| AD-35618.1 | uucAccAuuAuAGAGAAcAdTdT | 948 | UGUUCUCuAuAAUGGUGAAdTdT | 1375 |
| AD-35569.1 | uAuucucGAcAcAGcAGGudTdT | 949 | ACCUGCUGUGUCGAGAAuAdTdT | 1376 |
| AD-35534.1 | uucucGAaAcAGcAGGucAdTdT | 950 | UGACCUGCUGUGUCGAGAAdTdT | 1377 |
| AD-35582.1 | AAGAuAuucAccAuuAuAGdTdT | 951 | CuAuAAUGGUGAAuAUCUUdTdT | 1378 |
| AD-35594.1 | GAuAuucAccAuuAuAGAGdTdT | 952 | CUCuAuAAUGGUGAAuAUCdTdT | 1379 |
| AD-35600.1 | AuAuucAccAuuAuAGAGAdTdT | 953 | UCUCuAuAAUGGUGAAuAUdTdT | 1380 |
| AD-35606.1 | uAuucAccAuuAuAGAGAAdTdT | 954 | UUCUCuAuAAUGGUGAAuAdTdT | 1381 |
| AD-35612.1 | AuucAccAuuAuAGAGAAcdTdT | 955 | GUUCUCuAuAAUGGUGAAUdTdT | 1382 |
| AD-38127.1 | ucAccAuuAuAGAGAAcAAdTdT | 956 | UUGUUCUCuAuAAUGGUGAdTdT | 1383 |
| AD-38133.1 | aAccAuuAuAGAGAAcAAAdTdT | 957 | UUUGUUCUCuAuAAUGGUGdTdT | 1384 |
| AD-38139.1 | AccAuuAuAGAGAAcAAAudTdT | 958 | AUUUGUUCUCuAuAAUGGUdTdT | 1385 |
| AD-38145.1 | ccAuuAuAGAGAAcAAAuudTdT | 959 | AAUUUGUUCUCuAuAAUGGdTdT | 1386 |
| AD-38151.1 | aAuuAuAGAGAAcAAAuuAdTdT | 960 | uAAUUUGUUCUCuAuAAUGdTdT | 1387 |
| AD-38157.1 | AuuAuAGAGAAcAAAuuAAdTdT | 961 | UuAAUUUGUUCUCuAuAAUdTdT | 1388 |
| AD-38163.1 | uuAuAGAGAAcAAAuuAAAdTdT | 962 | UUuAAUUUGUUCUCuAuAAdTdT | 1389 |
| AD-38169.1 | uAuAGAGAAcAAAuuAAAAdTdT | 963 | UUUuAAUUUGUUCUCuAuAdTdT | 1390 |
| AD-38128.1 | AuAGAGAAcAAAuuAAAAGdTdT | 964 | CUUUuAAUUUGUUCUCuAUdTdT | 1391 |
| AD-38134.1 | uAGAGAAcAAAuuAAAAGAdTdT | 965 | UCUUUuAAUUUGUUCUCuAdTdT | 1392 |
| AD-38140.1 | AGAGAAcAAAuuAAAAGAGdTdT | 966 | CUCUUUuAAUUUGUUCUCUdTdT | 1393 |
| AD-38146.1 | GAAGAuGuAccuAuGGuccdTdT | 967 | GGACcAuAGGuAcAUCUUCdTdT | 1394 |
| AD-38152.1 | AAGAuGuAccuAuGGuccudTdT | 968 | AGGACcAuAGGuAcAUCUUdTdT | 1395 |
| AD-38158.1 | AGAuGuAccuAuGGuccuAdTdT | 969 | uAGGACcAuAGGuAcAUCUdTdT | 1396 |
| AD-38164.1 | GAuGuAccuAuGGuccuAGdTdT | 970 | CuAGGACcAuAGGuAcAUCdTdT | 1397 |
| AD-38170.1 | AuGuAccuAuGGuccuAGudTdT | 971 | ACuAGGACcAuAGGuAcAUdTdT | 1398 |
| AD-38129.1 | uGuAccuAuGGuccuAGuAdTdT | 972 | uACuAGGACcAuAGGuAcAdTdT | 1399 |
| AD-38135.1 | GuAccuAuGGuccuAGuAGdTdT | 973 | CuACuAGGACcAuAGGuACdTdT | 1400 |
| AD-38141.1 | uAccuAuGGuccuAGuAGGdTdT | 974 | CCuACuAGGACcAuAGGuAdTdT | 1401 |
| AD-38147.1 | AccuAuGGuccuAGuAGGAdTdT | 975 | UCCuACuAGGACcAuAGGUdTdT | 1402 |
| AD-38153.1 | ccuAuGGuccuAGuAGGAAdTdT | 976 | UUCCuACuAGGACcAuAGGdTdT | 1403 |
| AD-38159.1 | cuAuGGuccuAGuAGGAAAdTdT | 977 | UUUCCuACuAGGACcAuAGdTdT | 1404 |
| AD-38165.1 | uAuGGuccuAGuAGGAAAudTdT | 978 | AUUUCCuACuAGGACcAuAdTdT | 1405 |
| AD-38171.1 | AuGGuccuAGuAGGAAAuAdTdT | 979 | uAUUUCCuACuAGGACcAUdTdT | 1406 |
| AD-38130.1 | uGGuccuAGuAGGAAAuAAdTdT | 980 | UuAUUUCCuACuAGGACcAdTdT | 1407 |
| AD-38136.1 | GGuccuAGuAGGAAAuAAAdTdT | 981 | UUuAUUUCCuACuAGGACCdTdT | 1408 |
| AD-38142.1 | GuccuAGuAGGAAAuAAAudTdT | 982 | AUUuAUUUCCuACuAGGACdTdT | 1409 |
| AD-38148.1 | uccuAGuAGGAAAuAAAuGdTdT | 983 | cAUUuAUUUCCuACuAGGAdTdT | 1410 |
| AD-38154.1 | ccuAGuAGGAAAuAAAuGudTdT | 984 | AcAUUuAUUUCCuACuAGGdTdT | 1411 |
| AD-38160.1 | cuAGuAGGAAAuAAAuGuGdTdT | 985 | cAcAUUuAUUUCCuACuAGdTdT | 1412 |
| AD-38166.1 | uAGuAGGAAAuAAAuGuGAdTdT | 986 | UcAcAUUuAUUUCCuACuAdTdT | 1413 |
| AD-38172.1 | AGuAGGAAAuAAAuGuGAudTdT | 987 | AUcAcAUUuAUUUCCuACUdTdT | 1414 |
| AD-38131.1 | GGAAuuccuuuuAuuGAAAdTdT | 988 | UUUcAAuAAAAGGAAUUCCdTdT | 1415 |
| AD-38137.1 | GAAuuccuuuuAuuGAAAcdTdT | 989 | GUUUcAAuAAAAGGAAUUCdTdT | 1416 |
| AD-38143.1 | AAuuccuuuuAuuGAAAcAdTdT | 990 | UGUUUcAAuAAAAGGAAUUdTdT | 1417 |
| AD-38149.1 | AuuccuuuuAuuGAAAcAudTdT | 991 | AUGUUUcAAuAAAAGGAAUdTdT | 1418 |
| AD-38155.1 | uuccuuuuAuuGAAAcAucdTdT | 992 | GAUGUUUcAAuAAAAGGAAdTdT | 1419 |
| AD-38161.1 | uccuuuuAuuGAAAcAucAdTdT | 993 | UGAUGUUUcAAuAAAAGGAdTdT | 1420 |
| AD-38167.1 | ccuuuuAuuGAAAcAucAGdTdT | 994 | CUGAUGUUUcAAuAAAAGGdTdT | 1421 |
| AD-38173.1 | cuuuuAuuGAAAcAucAGcdTdT | 995 | GCUGAUGUUUcAAuAAAAGdTdT | 1422 |
| AD-38132.1 | uuuuAuuGAAAcAucAGcAdTdT | 996 | UGCUGAUGUUUcAAuAAAAdTdT | 1423 |
| AD-38138.1 | uuuAuuGAAAcAucAGcAAdTdT | 997 | UUGCUGAUGUUUcAAuAAAdTdT | 1424 |
| AD-38144.1 | uuAuuGAAAcAucAGcAAAdTdT | 998 | UUUGCUGAUGUUUcAAuAAdTdT | 1425 |
| AD-38150.1 | uAuuGAAAcAucAGcAAAGdTdT | 999 | CUUUGCUGAUGUUUcAAuAdTdT | 1426 |
| AD-38156.1 | AuuGAAAcAucAGcAAAGAdTdT | 1000 | UCUUUGCUGAUGUUUcAAUdTdT | 1427 |
| AD-38162.1 | uuGAAAcAucAGcAAAGAcdTdT | 1001 | GUCUUUGCUGAUGUUUcAAdTdT | 1428 |
| AD-38168.1 | uGAAAcAucAGcAAAGAcAdTdT | 1002 | UGUCUUUGCUGAUGUUUcAdTdT | 1429 |
| AD-38174.1 | GAAAcAucAGcAAAGAcAAdTdT | 1003 | UUGUCUUUGCUGAUGUUUCdTdT | 1430 |
| AD-39683.1 | AuGAcuGAAuAuAAAcuuGdTdT | 1004 | cAAGUUuAuAUUcAGUcAUdTdT | 1431 |
| AD-39689.1 | uGAcuGAAuAuAAAcuuGudTdT | 1005 | AcAAGUUuAuAUUcAGUcAdTdT | 1432 |
| AD-39695.1 | GAcuGAAuAuAAAcuuGuGdTdT | 1006 | aAcAAGUUuAuAUUcAGUCdTdT | 1433 |
| AD-39701.1 | AcuGAAuAuAAAcuuGuGGdTdT | 1007 | CcAcAAGUUuAuAUUcAGUdTdT | 1434 |
| AD-39707.1 | cuGAAuAuAAAcuuGuGGudTdT | 1008 | ACcAcAAGUUuAuAUUcAGdTdT | 1435 |
| AD-39713.1 | uGAAuAuAAAcuuGuGGuAdTdT | 1009 | uACcAcAAGUUuAuAUUcAdTdT | 1436 |
| AD-39719.1 | GAAuAuAAAcuuGuGGuAGdTdT | 1010 | CuACcAcAAGUUuAuAUUCdTdT | 1437 |
| AD-39725.1 | AAuAuAAAcuuGuGGuAGudTdT | 1011 | ACuACcAcAAGUUuAuAUUdTdT | 1438 |
| AD-39684.1 | AuAuAAAcuuGuGGuAGuudTdT | 1012 | AACuACcAcAAGUUuAuAUdTdT | 1439 |
| AD-39690.1 | uAuAAAcuuGuGGuAGuuGdTdT | 1013 | cAACuACcAcAAGUUuAuAdTdT | 1440 |
| AD-39696.1 | AuAAAcuuGuGGuAGuuGGdTdT | 1014 | CcAACuACcAcAAGUUuAUdTdT | 1441 |
| AD-39702.1 | uAAAcuuGuGGuAGuuGGAdTdT | 1015 | UCcAACuACcAcAAGUUuAdTdT | 1442 |
| AD-39708.1 | AAAcuuGuGGuAGuuGGAGdTdT | 1016 | CUCcAACuACcAcAAGUUUdTdT | 1443 |
| AD-39714.1 | AAcuuGuGGuAGuuGGAGcdTdT | 1017 | GCUCcAACuACcAcAAGUUdTdT | 1444 |
| AD-39720.1 | AcuuGuGGuAGuuGGAGcudTdT | 1018 | AGCUCcAACuACcAcAAGUdTdT | 1445 |
| AD-39726.1 | cuuGuGGuAGuuGGAGcuGdTdT | 1019 | aAGCUCcAACuACcAcAAGdTdT | 1446 |
| AD-39685.1 | uuGuGGuAGuuGGAGcuGGdTdT | 1020 | CcAGCUCcAACuACcAcAAdTdT | 1447 |
| AD-39691.1 | uGuGGuAGuuGGAGcuGGudTdT | 1021 | ACcAGCUCcAACuACcAcAdTdT | 1448 |
| AD-39697.1 | GuGGuAGuuGGAGcuGGuGdTdT | 1022 | aACcAGCUCcAACuACcACdTdT | 1449 |
| AD-39703.1 | uGGuAGuuGGAGcuGGuGGdTdT | 1023 | CcACcAGCUCcAACuACcAdTdT | 1450 |
| AD-39709.1 | GGuAGuuGGAGcuGGuGGcdTdT | 1024 | GCcACcAGCUCcAACuACCdTdT | 1451 |
| AD-39715.1 | GuAGuuGGAGcuGGuGGcGdTdT | 1025 | CGCcACcAGCUCcAACuACdTdT | 1452 |
| AD-39721.1 | uAGuuGGAGcuGGuGGcGudTdT | 1026 | ACGCcACcAGCUCcAACuAdTdT | 1453 |
| AD-39727.1 | AGuuGGAGcuGGuGGcGuAdTdT | 1027 | uACGCcACcAGCUCcAACUdTdT | 1454 |
| AD-39686.1 | GuuGGAGcuGGuGGcGuAGdTdT | 1028 | CuACGCcACcAGCUCcAACdTdT | 1455 |
| AD-39692.1 | uuGGAGcuGGuGGcGuAGGdTdT | 1029 | CCuACGCcACcAGCUCcAAdTdT | 1456 |
| AD-39698.1 | uGGAGcuGGuGGcGuAGGcdTdT | 1030 | GCCuACGCcACcAGCUCcAdTdT | 1457 |
| AD-39704.1 | GGAGcuGGuGGcGuAGGcAdTdT | 1031 | UGCCuACGCcACcAGCUCCdTdT | 1458 |
| AD-39710.1 | GAGcuGGuGGcGuAGGcAAdTdT | 1032 | UUGCCuACGCcACcAGCUCdTdT | 1459 |
| AD-39716.1 | AGcuGGuGGcGuAGGcAAGdTdT | 1033 | CUUGCCuACGCcACcAGCUdTdT | 1460 |
| AD-39722.1 | GcuGGuGGcGuAGGcAAGAdTdT | 1034 | UCUUGCCuACGCcACcAGCdTdT | 1461 |
| AD-39728.1 | cuGGuGGcGuAGGcAAGAGdTdT | 1035 | CUCUUGCCuACGCcACcAGdTdT | 1462 |
| AD-39687.1 | uGGuGGcGuAGGcAAGAGudTdT | 1036 | ACUCUUGCCuACGCcACcAdTdT | 1463 |
| AD-39693.1 | GGuGGcGuAGGcAAGAGuGdTdT | 1037 | aACUCUUGCCuACGCcACCdTdT | 1464 |
| AD-39699.1 | GuGGcGuAGGcAAGAGuGcdTdT | 1038 | GcACUCUUGCCuACGCcACdTdT | 1465 |
| AD-39705.1 | uGGcGuAGGcAAGAGuGccdTdT | 1039 | GGcACUCUUGCCuACGCcAdTdT | 1466 |
| AD-39711.1 | GGcGuAGGcAAGAGuGccudTdT | 1040 | AGGcACUCUUGCCuACGCCdTdT | 1467 |
| AD-39717.1 | GcGuAGGcAAGAGuGccuudTdT | 1041 | AAGGcACUCUUGCCuACGCdTdT | 1468 |
| AD-39723.1 | cGuAGGcAAGAGuGccuuGdTdT | 1042 | cAAGGcACUCUUGCCuACGdTdT | 1469 |
| AD-39729.1 | GuAGGcAAGAGuGccuuGAdTdT | 1043 | UcAAGGcACUCUUGCCuACdTdT | 1470 |
| AD-39688.1 | uAGGcAAGAGuGccuuGAcdTdT | 1044 | GUcAAGGcACUCUUGCCuAdTdT | 1471 |
| AD-39694.1 | AGGcAAGAGuGccuuGAcGdTdT | 1045 | CGUcAAGGcACUCUUGCCUdTdT | 1472 |
| AD-39700.1 | GGcAAGAGuGccuuGAcGAdTdT | 1046 | UCGUcAAGGcACUCUUGCCdTdT | 1473 |
| AD-39706.1 | GcAAGAGuGccuuGAcGAudTdT | 1047 | AUCGUcAAGGcACUCUUGCdTdT | 1474 |
| AD-39712.1 | cAAGAGuGccuuGAcGAuAdTdT | 1048 | uAUCGUcAAGGcACUCUUGdTdT | 1475 |
| AD-39718.1 | AAGAGuGccuuGAcGAuAcdTdT | 1049 | GuAUCGUcAAGGcACUCUUdTdT | 1476 |
| AD-39724.1 | AGAGuGccuuGAcGAuAcAdTdT | 1050 | UGuAUCGUcAAGGcACUCUdTdT | 1477 |
| AD-39730.1 | GAGuGccuuGAcGAuAcAGdTdT | 1051 | CUGuAUCGUcAAGGcACUCdTdT | 1478 |
| AD-39736.1 | AGuGccuuGAcGAuAcAGcdTdT | 1052 | GCUGuAUCGUcAAGGcACUdTdT | 1479 |
| AD-39742.1 | GuGccuuGAcGAuAcAGcudTdT | 1053 | AGCUGuAUCGUcAAGGcACdTdT | 1480 |
| AD-39748.1 | uGccuuGAcGAuAcAGcuAdTdT | 1054 | uAGCUGuAUCGUcAAGGcAdTdT | 1481 |
| AD-39754.1 | GccuuGAcGAuAcAGcuAAdTdT | 1055 | UuAGCUGuAUCGUcAAGGCdTdT | 1482 |
| AD-39760.1 | ccuuGAcGAuAcAGcuAAudTdT | 1056 | AUuAGCUGuAUCGUcAAGGdTdT | 1483 |
| AD-39766.1 | cuuGAcGAuAcAGcuAAuudTdT | 1057 | AAUuAGCUGuAUCGUcAAGdTdT | 1484 |
| AD-39772.1 | uuGAcGAuAcAGcuAAuucdTdT | 1058 | GAAUuAGCUGuAUCGUcAAdTdT | 1485 |
| AD-39731.1 | uGAcGAuAcAGcuAAuucAdTdT | 1059 | UGAAUuAGCUGuAUCGUcAdTdT | 1486 |
| AD-39737.1 | GAcGAuAcAGcuAAuucAGdTdT | 1060 | CUGAAUuAGCUGuAUCGUCdTdT | 1487 |
| AD-39743.1 | AcGAuAcAGcuAAuucAGAdTdT | 1061 | UCUGAAUuAGCUGuAUCGUdTdT | 1488 |
| AD-39749.1 | cGAuAcAGcuAAuucAGAAdTdT | 1062 | UUCUGAAUuAGCUGuAUCGdTdT | 1489 |
| AD-39755.1 | GAuAcAGcuAAuucAGAAudTdT | 1063 | AUUCUGAAUuAGCUGuAUCdTdT | 1490 |
| AD-39761.1 | AuAcAGcuAAuucAGAAucdTdT | 1064 | GAUUCUGAAUuAGCUGuAUdTdT | 1491 |
| AD-39767.1 | uAcAGcuAAuucAGAAucAdTdT | 1065 | UGAUUCUGAAUuAGCUGuAdTdT | 1492 |
| AD-39773.1 | AcAGcuAAuucAGAAucAudTdT | 1066 | AUGAUUCUGAAUuAGCUGUdTdT | 1493 |
| AD-39732.1 | aAGcuAAuucAGAAucAuudTdT | 1067 | AAUGAUUCUGAAUuAGCUGdTdT | 1494 |
| AD-39738.1 | AGcuAAuucAGAAucAuuudTdT | 1068 | AAAUGAUUCUGAAUuAGCUdTdT | 1495 |
| AD-39744.1 | GcuAAuucAGAAucAuuuudTdT | 1069 | AAAAUGAUUCUGAAUuAGCdTdT | 1496 |
| AD-39750.1 | cuAAuucAGAAucAuuuuGdTdT | 1070 | cAAAAUGAUUCUGAAUuAGdTdT | 1497 |
| AD-39756.1 | uAAuucAGAAucAuuuuGudTdT | 1071 | AcAAAAUGAUUCUGAAUuAdTdT | 1498 |
| AD-39762.1 | AAuucAGAAucAuuuuGuGdTdT | 1072 | aAcAAAAUGAUUCUGAAUUdTdT | 1499 |
| AD-39768.1 | AuucAGAAucAuuuuGuGGdTdT | 1073 | CcAcAAAAUGAUUCUGAAUdTdT | 1500 |
| AD-39774.1 | uucAGAAucAuuuuGuGGAdTdT | 1074 | UCcAcAAAAUGAUUCUGAAdTdT | 1501 |
| AD-39733.1 | ucAGAAucAuuuuGuGGAcdTdT | 1075 | GUCcAcAAAAUGAUUCUGAdTdT | 1502 |
| AD-39739.1 | aAGAAucAuuuuGuGGAcGdTdT | 1076 | CGUCcAcAAAAUGAUUCUGdTdT | 1503 |
| AD-39745.1 | AGAAucAuuuuGuGGAcGAdTdT | 1077 | UCGUCcAcAAAAUGAUUCUdTdT | 1504 |
| AD-39751.1 | GAAucAuuuuGuGGAcGAAdTdT | 1078 | UUCGUCcAcAAAAUGAUUCdTdT | 1505 |
| AD-39757.1 | AAucAuuuuGuGGAcGAAudTdT | 1079 | AUUCGUCcAcAAAAUGAUUdTdT | 1506 |
| AD-39763.1 | AucAuuuuGuGGAcGAAuAdTdT | 1080 | uAUUCGUCcAcAAAAUGAUdTdT | 1507 |
| AD-39769.1 | ucAuuuuGuGGAcGAAuAudTdT | 1081 | AuAUUCGUCcAcAAAAUGAdTdT | 1508 |
| AD-39775.1 | aAuuuuGuGGAcGAAuAuGdTdT | 1082 | aAuAUUCGUCcAcAAAAUGdTdT | 1509 |
| AD-39734.1 | AuuuuGuGGAcGAAuAuGAdTdT | 1083 | UcAuAUUCGUCcAcAAAAUdTdT | 1510 |
| AD-39740.1 | uuuuGuGGAcGAAuAuGAudTdT | 1084 | AUcAuAUUCGUCcAcAAAAdTdT | 1511 |
| AD-39746.1 | uuuGuGGAcGAAuAuGAucdTdT | 1085 | GAUcAuAUUCGUCcAcAAAdTdT | 1512 |
| AD-39752.1 | uuGuGGAcGAAuAuGAuccdTdT | 1086 | GGAUcAuAUUCGUCcAcAAdTdT | 1513 |
| AD-39758.1 | uGuGGAcGAAuAuGAuccAdTdT | 1087 | UGGAUcAuAUUCGUCcAcAdTdT | 1514 |
| AD-39764.1 | GuGGAcGAAuAuGAuccAAdTdT | 1088 | UUGGAUcAuAUUCGUCcACdTdT | 1515 |
| AD-39770.1 | uGGAcGAAuAuGAuccAAcdTdT | 1089 | GUUGGAUcAuAUUCGUCcAdTdT | 1516 |
| AD-39776.1 | AGGAAGcAAGuAGuAAuuGdTdT | 1090 | cAAUuACuACUUGCUUCCUdTdT | 1517 |
| AD-39735.1 | GGAAGcAAGuAGuAAuuGAdTdT | 1091 | UcAAUuACuACUUGCUUCCdTdT | 1518 |
| AD-39741.1 | GAAGcAAGuAGuAAuuGAudTdT | 1092 | AUcAAUuACuACUUGCUUCdTdT | 1519 |
| AD-39747.1 | AAGcAAGuAGuAAuuGAuGdTdT | 1093 | cAUcAAUuACuACUUGCUUdTdT | 1520 |
| AD-39753.1 | AGcAAGuAGuAAuuGAuGGdTdT | 1094 | CcAUcAAUuACuACUUGCUdTdT | 1521 |
| AD-39759.1 | GcAAGuAGuAAuuGAuGGAdTdT | 1095 | UCcAUcAAUuACuACUUGCdTdT | 1522 |
| AD-39765.1 | cAAGuAGuAAuuGAuGGAGdTdT | 1096 | CUCcAUcAAUuACuACUUGdTdT | 1523 |
| AD-39771.1 | AAGuAGuAAuuGAuGGAGAdTdT | 1097 | UCUCcAUcAAUuACuACUUdTdT | 1524 |
| AD-39778.1 | AGuAGuAAuuGAuGGAGAAdTdT | 1098 | UUCUCcAUcAAUuACuACUdTdT | 1525 |
| AD-39784.1 | GuAGuAAuuGAuGGAGAAAdTdT | 1099 | UUUCUCcAUcAAUuACuACdTdT | 1526 |
| AD-39790.1 | uAGuAAuuGAuGGAGAAAcdTdT | 1100 | GUUUCUCcAUcAAUuACuAdTdT | 1527 |
| AD-39796.1 | AGuAAuuGAuGGAGAAAccdTdT | 1101 | GGUUUCUCcAUcAAUuACUdTdT | 1528 |
| AD-39802.1 | GuAAuuGAuGGAGAAAccudTdT | 1102 | AGGUUUCUCcAUcAAUuACdTdT | 1529 |
| AD-39808.1 | uAAuuGAuGGAGAAAccuGdTdT | 1103 | cAGGUUUCUCcAUcAAUuAdTdT | 1530 |
| AD-39814.1 | AAuuGAuGGAGAAAccuGudTdT | 1104 | AcAGGUUUCUCcAUcAAUUdTdT | 1531 |
| AD-39820.1 | AuuGAuGGAGAAAccuGucdTdT | 1105 | GAcAGGUUUCUCcAUcAAUdTdT | 1532 |
| AD-39779.1 | uuGAuGGAGAAAccuGucudTdT | 1106 | AGAcAGGUUUCUCcAUcAAdTdT | 1533 |
| AD-39785.1 | uGAuGGAGAAAccuGucucdTdT | 1107 | GAGAcAGGUUUCUCcAUcAdTdT | 1534 |
| AD-39791.1 | GAuGGAGAAAccuGucucudTdT | 1108 | AGAGAcAGGUUUCUCcAUCdTdT | 1535 |
| AD-39797.1 | AuGGAGAAAccuGucucuudTdT | 1109 | AAGAGAcAGGUUUCUCcAUdTdT | 1536 |
| AD-39803.1 | uGGAGAAAccuGucucuuGdTdT | 1110 | cAAGAGAcAGGUUUCUCcAdTdT | 1537 |
| AD-39809.1 | GGAGAAAccuGucucuuGGdTdT | 1111 | CcAAGAGAcAGGUUUCUCCdTdT | 1538 |
| AD-39815.1 | GAGAAAccuGucucuuGGAdTdT | 1112 | UCcAAGAGAcAGGUUUCUCdTdT | 1539 |
| AD-39821.1 | AGAAAccuGucucuuGGAudTdT | 1113 | AUCcAAGAGAcAGGUUUCUdTdT | 1540 |
| AD-39780.1 | GAAAccuGucucuuGGAuAdTdT | 1114 | uAUCcAAGAGAcAGGUUUCdTdT | 1541 |
| AD-39786.1 | AAAccuGucucuuGGAuAudTdT | 1115 | AuAUCcAAGAGAcAGGUUUdTdT | 1542 |
| AD-39792.1 | AAccuGucucuuGGAuAuudTdT | 1116 | AAuAUCcAAGAGAcAGGUUdTdT | 1543 |
| AD-39798.1 | AccuGucucuuGGAuAuucdTdT | 1117 | GAAuAUCcAAGAGAcAGGUdTdT | 1544 |
| AD-39804.1 | ccuGucucuuGGAuAuucudTdT | 1118 | AGAAuAUCcAAGAGAcAGGdTdT | 1545 |
| AD-39810.1 | cuGucucuuGGAuAuucucdTdT | 1119 | GAGAAuAUCcAAGAGAcAGdTdT | 1546 |
| AD-39816.1 | uGucucuuGGAuAuucucGdTdT | 1120 | CGAGAAuAUCcAAGAGAcAdTdT | 1547 |
| AD-39822.1 | GucucuuGGAuAuucucGAdTdT | 1121 | UCGAGAAuAUCcAAGAGACdTdT | 1548 |
| AD-39781.1 | ucucuuGGAuAuucucGAcdTdT | 1122 | GUCGAGAAuAUCcAAGAGAdTdT | 1549 |
| AD-39787.1 | cucuuGGAuAuucucGAcAdTdT | 1123 | UGUCGAGAAuAUCcAAGAGdTdT | 1550 |
| AD-39793.1 | ucuuGGAuAuucucGAcAcdTdT | 1124 | GUGUCGAGAAuAUCcAAGAdTdT | 1551 |
| AD-39799.1 | cuuGGAuAuucucGAcAcAdTdT | 1125 | UGUGUCGAGAAuAUCcAAGdTdT | 1552 |
| AD-39805.1 | AGuAcAGuGcAAuGAGGGAdTdT | 1126 | UCCCUcAUUGcACUGuACUdTdT | 1553 |
| AD-39811.1 | GuAcAGuGcAAuGAGGGAcdTdT | 1127 | GUCCCUcAUUGcACUGuACdTdT | 1554 |
| AD-39817.1 | uAcAGuGcAAuGAGGGAccdTdT | 1128 | GGUCCCUcAUUGcACUGuAdTdT | 1555 |
| AD-39823.1 | AcAGuGcAAuGAGGGAccAdTdT | 1129 | UGGUCCCUcAUUGcACUGUdTdT | 1556 |
| AD-39782.1 | aAGuGcAAuGAGGGAccAGdTdT | 1130 | CUGGUCCCUcAUUGcACUGdTdT | 1557 |
| AD-39788.1 | AGuGcAAuGAGGGAccAGudTdT | 1131 | ACUGGUCCCUcAUUGcACUdTdT | 1558 |
| AD-39794.1 | GuGcAAuGAGGGAccAGuAdTdT | 1132 | uACUGGUCCCUcAUUGcACdTdT | 1559 |
| AD-39800.1 | uGcAAuGAGGGAccAGuAcdTdT | 1133 | GuACUGGUCCCUcAUUGcAdTdT | 1560 |
| AD-39806.1 | GcAAuGAGGGAccAGuAcAdTdT | 1134 | UGuACUGGUCCCUcAUUGCdTdT | 1561 |
| AD-39812.1 | cAAuGAGGGAccAGuAcAudTdT | 1135 | AUGuACUGGUCCCUcAUUGdTdT | 1562 |
| AD-39818.1 | AAuGAGGGAccAGuAcAuGdTdT | 1136 | cAUGuACUGGUCCCUcAUUdTdT | 1563 |
| AD-39824.1 | AuGAGGGAccAGuAcAuGAdTdT | 1137 | UcAUGuACUGGUCCCUcAUdTdT | 1564 |
| AD-39783.1 | uGAGGGAccAGuAcAuGAGdTdT | 1138 | CUcAUGuACUGGUCCCUcAdTdT | 1565 |
| AD-39789.1 | GAGGGAccAGuAcAuGAGGdTdT | 1139 | CCUcAUGuACUGGUCCCUCdTdT | 1566 |
| AD-39795.1 | AGGGAccAGuAcAuGAGGAdTdT | 1140 | UCCUcAUGuACUGGUCCCUdTdT | 1567 |
| AD-39801.1 | GGGAccAGuAcAuGAGGAcdTdT | 1141 | GUCCUcAUGuACUGGUCCCdTdT | 1568 |
| AD-39807.1 | GGAccAGuAcAuGAGGAcudTdT | 1142 | AGUCCUcAUGuACUGGUCCdTdT | 1569 |
| AD-39813.1 | GAccAGuAcAuGAGGAcuGdTdT | 1143 | cAGUCCUcAUGuACUGGUCdTdT | 1570 |
| AD-39819.1 | AccAGuAcAuGAGGAcuGGdTdT | 1144 | CcAGUCCUcAUGuACUGGUdTdT | 1571 |
| AD-39825.1 | ccAGuAcAuGAGGAcuGGGdTdT | 1145 | CCcAGUCCUcAUGuACUGGdTdT | 1572 |
| AD-39831.1 | aAGuAcAuGAGGAcuGGGGdTdT | 1146 | CCCcAGUCCUcAUGuACUGdTdT | 1573 |
| AD-39837.1 | AGuAcAuGAGGAcuGGGGAdTdT | 1147 | UCCCcAGUCCUcAUGuACUdTdT | 1574 |
| AD-39843.1 | GuAcAuGAGGAcuGGGGAGdTdT | 1148 | CUCCCcAGUCCUcAUGuACdTdT | 1575 |
| AD-39849.1 | uAcAuGAGGAcuGGGGAGGdTdT | 1149 | CCUCCCcAGUCCUcAUGuAdTdT | 1576 |
| AD-39855.1 | AcAuGAGGAcuGGGGAGGGdTdT | 1150 | CCCUCCCcAGUCCUcAUGUdTdT | 1577 |
| AD-39861.1 | aAuGAGGAcuGGGGAGGGcdTdT | 1151 | GCCCUCCCcAGUCCUcAUGdTdT | 1578 |
| AD-39867.1 | AuGAGGAcuGGGGAGGGcudTdT | 1152 | AGCCCUCCCcAGUCCUcAUdTdT | 1579 |
| AD-39826.1 | uGAGGAcuGGGGAGGGcuudTdT | 1153 | AAGCCCUCCCcAGUCCUcAdTdT | 1580 |
| AD-39832.1 | GAGGAcuGGGGAGGGcuuudTdT | 1154 | AAAGCCCUCCCcAGUCCUCdTdT | 1581 |
| AD-39838.1 | AGGAcuGGGGAGGGcuuucdTdT | 1155 | GAAAGCCCUCCCcAGUCCUdTdT | 1582 |
| AD-39844.1 | GGAcuGGGGAGGGcuuucudTdT | 1156 | AGAAAGCCCUCCCcAGUCCdTdT | 1583 |
| AD-39850.1 | GAcuGGGGAGGGcuuucuudTdT | 1157 | AAGAAAGCCCUCCCcAGUCdTdT | 1584 |
| AD-39856.1 | AcuGGGGAGGGcuuucuuudTdT | 1158 | AAAGAAAGCCCUCCCcAGUdTdT | 1585 |
| AD-39862.1 | cuGGGGAGGGcuuucuuuGdTdT | 1159 | cAAAGAAAGCCCUCCCcAGdTdT | 1586 |
| AD-39868.1 | uGGGGAGGGcuuucuuuGudTdT | 1160 | AcAAAGAAAGCCCUCCCcAdTdT | 1587 |
| AD-39827.1 | uuGccAuAAAuAAuAcuAAdTdT | 1161 | UuAGuAUuAUUuAUGGcAAdTdT | 1588 |
| AD-39833.1 | uGccAuAAAuAAuAcuAAAdTdT | 1162 | UUuAGuAUuAUUuAUGGcAdTdT | 1589 |
| AD-39839.1 | GccAuAAAuAAuAcuAAAudTdT | 1163 | AUUuAGuAUuAUUuAUGGCdTdT | 1590 |
| AD-39845.1 | ccAuAAAuAAuAcuAAAucdTdT | 1164 | GAUUuAGuAUuAUUuAUGGdTdT | 1591 |
| AD-39851.1 | cAuAAAuAAuAcuAAAucAdTdT | 1165 | UGAUUuAGuAUuAUUuAUGdTdT | 1592 |
| AD-39857.1 | AuAAAuAAuAcuAAAucAudTdT | 1166 | AUGAUUuAGuAUuAUUuAUdTdT | 1593 |
| AD-39863.1 | uAAAuAAuAcuAAAucAuudTdT | 1167 | AAUGAUUuAGuAUuAUUuAdTdT | 1594 |
| AD-39869.1 | AAAuAAuAcuAAAucAuuudTdT | 1168 | AAAUGAUUuAGuAUuAUUUdTdT | 1595 |
| AD-39828.1 | AAuAAuAcuAAAucAuuuGdTdT | 1169 | cAAAUGAUUuAGuAUuAUUdTdT | 1596 |
| AD-39834.1 | AuAAuAcuAAAucAuuuGAdTdT | 1170 | UcAAAUGAUUuAGuAUuAUdTdT | 1597 |
| AD-39840.1 | uAAuAcuAAAucAuuuGAAdTdT | 1171 | UUcAAAUGAUUuAGuAUuAdTdT | 1598 |
| AD-39846.1 | AAuAcuAAAucAuuuGAAGdTdT | 1172 | CUUcAAAUGAUUuAGuAUUdTdT | 1599 |
| AD-39852.1 | AuAcuAAAucAuuuGAAGAdTdT | 1173 | UCUUcAAAUGAUUuAGuAUdTdT | 1600 |
| AD-39858.1 | uAcuAAAucAuuuGAAGAudTdT | 1174 | AUCUUcAAAUGAUUuAGuAdTdT | 1601 |
| AD-39864.1 | AcuAAAucAuuuGAAGAuAdTdT | 1175 | uAUCUUcAAAUGAUUuAGUdTdT | 1602 |
| AD-39870.1 | cuAAAucAuuuGAAGAuAudTdT | 1176 | AuAUCUUcAAAUGAUUuAGdTdT | 1603 |
| AD-39829.1 | uAAAucAuuuGAAGAuAuudTdT | 1177 | AAuAUCUUcAAAUGAUUuAdTdT | 1604 |
| AD-39835.1 | AAAucAuuuGAAGAuAuucdTdT | 1178 | GAAuAUCUUcAAAUGAUUUdTdT | 1605 |
| AD-39841.1 | AAucAuuuGAAGAuAuucAdTdT | 1179 | UGAAuAUCUUcAAAUGAUUdTdT | 1606 |
| AD-39853.1 | ucAuuuGAAGAuAuucAccdTdT | 1180 | GGUGAAuAUCUUcAAAUGAdTdT | 1607 |
| AD-39859.1 | aAuuuGAAGAuAuucAccAdTdT | 1181 | UGGUGAAuAUCUUcAAAUGdTdT | 1608 |
| AD-39865.1 | AuuuGAAGAuAuucAccAudTdT | 1182 | AUGGUGAAuAUCUUcAAAUdTdT | 1609 |
| AD-39871.1 | uuuGAAGAuAuucAccAuudTdT | 1183 | AAUGGUGAAuAUCUUcAAAdTdT | 1610 |
| AD-39830.1 | uuGAAGAuAuucAccAuuAdTdT | 1184 | uAAUGGUGAAuAUCUUcAAdTdT | 1611 |
| AD-39836.1 | GAGAAcAAAuuAAAAGAGudTdT | 1185 | ACUCUUUuAAUUUGUUCUCdTdT | 1612 |
| AD-39842.1 | AGAAcAAAuuAAAAGAGuudTdT | 1186 | AACUCUUUuAAUUUGUUCUdTdT | 1613 |
| AD-39848.1 | GAAcAAAuuAAAAGAGuuAdTdT | 1187 | uAACUCUUUuAAUUUGUUCdTdT | 1614 |
| AD-39854.1 | AAcAAAuuAAAAGAGuuAAdTdT | 1188 | UuAACUCUUUuAAUUUGUUdTdT | 1615 |
| AD-39860.1 | AcAAAuuAAAAGAGuuAAGdTdT | 1189 | CUuAACUCUUUuAAUUUGUdTdT | 1616 |
| AD-39866.1 | cAAAuuAAAAGAGuuAAGGdTdT | 1190 | CCUuAACUCUUUuAAUUUGdTdT | 1617 |
| AD-39992.1 | AAAuuAAAAGAGuuAAGGAdTdT | 1191 | UCCUuAACUCUUUuAAUUUdTdT | 1618 |
| AD-39998.1 | AAuuAAAAGAGuuAAGGAcdTdT | 1192 | GUCCUuAACUCUUUuAAUUdTdT | 1619 |
| AD-40004.1 | AuuAAAAGAGuuAAGGAcudTdT | 1193 | AGUCCUuAACUCUUUuAAUdTdT | 1620 |
| AD-40010.1 | uuAAAAGAGuuAAGGAcucdTdT | 1194 | GAGUCCUuAACUCUUUuAAdTdT | 1621 |
| AD-40016.1 | uAAAAGAGuuAAGGAcucudTdT | 1195 | AGAGUCCUuAACUCUUUuAdTdT | 1622 |
| AD-40022.1 | AAAAGAGuuAAGGAcucuGdTdT | 1196 | aAGAGUCCUuAACUCUUUUdTdT | 1623 |
| AD-40028.1 | AAAGAGuuAAGGAcucuGAdTdT | 1197 | UcAGAGUCCUuAACUCUUUdTdT | 1624 |
| AD-40034.1 | AAGAGuuAAGGAcucuGAAdTdT | 1198 | UUcAGAGUCCUuAACUCUUdTdT | 1625 |
| AD-39999.1 | GAGuuAAGGAcucuGAAGAdTdT | 1199 | UCUUcAGAGUCCUuAACUCdTdT | 1626 |
| AD-40005.1 | AGuuAAGGAcucuGAAGAudTdT | 1200 | AUCUUcAGAGUCCUuAACUdTdT | 1627 |
| AD-40011.1 | GuuAAGGAcucuGAAGAuGdTdT | 1201 | cAUCUUcAGAGUCCUuAACdTdT | 1628 |
| AD-40017.1 | uuAAGGAcucuGAAGAuGudTdT | 1202 | AcAUCUUcAGAGUCCUuAAdTdT | 1629 |
| AD-40029.1 | AAGGAcucuGAAGAuGuAcdTdT | 1203 | GuAcAUCUUcAGAGUCCUUdTdT | 1630 |
| AD-40035.1 | AGGAcucuGAAGAuGuAccdTdT | 1204 | GGuAcAUCUUcAGAGUCCUdTdT | 1631 |
| AD-39994.1 | GGAcucuGAAGAuGuAccudTdT | 1205 | AGGuAcAUCUUcAGAGUCCdTdT | 1632 |
| AD-40000.1 | GAcucuGAAGAuGuAccuAdTdT | 1206 | nAGGuAcAUCUUcAGAGUCdTdT | 1633 |
| AD-40006.1 | AcucuGAAGAuGuAccuAudTdT | 1207 | AuAGGuAcAUCUUcAGAGUdTdT | 1634 |
| AD-40012.1 | cucuGAAGAuGuAccuAuGdTdT | 1208 | aAuAGGuAcAUCUUcAGAGdTdT | 1635 |
| AD-40018.1 | ucuGAAGAuGuAccuAuGGdTdT | 1209 | CcAuAGGuAcAUCUUcAGAdTdT | 1636 |
| AD-40024.1 | cuGAAGAuGuAccuAuGGudTdT | 1210 | ACcAuAGGuAcAUCUUcAGdTdT | 1637 |
| AD-40030.1 | uGAAGAuGuAccuAuGGucdTdT | 1211 | GACcAuAGGuAcAUCUUcAdTdT | 1638 |
| AD-40036.1 | GuAGGAAAuAAAuGuGAuudTdT | 1212 | AAUcAcAUUuAUUUCCuACdTdT | 1639 |
| AD-39995.1 | nAGGAAAuAAAuGuGAuuudTdT | 1213 | AAAUcAcAUUuAUUUCCuAdTdT | 1640 |
| AD-40001.1 | AGGAAAuAAAuGuGAuuuGdTdT | 1214 | cAAAUcAcAUUuAUUUCCUdTdT | 1641 |
| AD-40007.1 | GGAAAuAAAuGuGAuuuGcdTdT | 1215 | GcAAAUcAcAUUuAUUUCCdTdT | 1642 |
| AD-40013.1 | GAAAuAAAuGuGAuuuGccdTdT | 1216 | GGcAAAUcAcAUUuAUUUCdTdT | 1643 |
| AD-40019.1 | AAAuAAAuGuGAuuuGccudTdT | 1217 | AGGcAAAUcAcAUUuAUUUdTdT | 1644 |
| AD-40025.1 | AAuAAAuGuGAuuuGccuudTdT | 1218 | AAGGcAAAUcAcAUUuAUUdTdT | 1645 |
| AD-40031.1 | AuAAAuGuGAuuuGccuucdTdT | 1219 | GAAGGcAAAUcAcAUUuAUdTdT | 1646 |
| AD-40037.1 | uAAAuGuGAuuuGccuucudTdT | 1220 | AGAAGGcAAAUcAcAUUuAdTdT | 1647 |
| AD-39996.1 | AAAuGuGAuuuGccuucuAdTdT | 1221 | nAGAAGGcAAAUcAcAUUUdTdT | 1648 |
| AD-40002.1 | AAuGuGAuuuGccuucuAGdTdT | 1222 | CuAGAAGGcAAAUcAcAUUdTdT | 1649 |
| AD-40008.1 | AuGuGAuuuGccuucuAGAdTdT | 1223 | UCuAGAAGGcAAAUcAcAUdTdT | 1650 |
| AD-40014.1 | uGuGAuuuGccuucuAGAAdTdT | 1224 | UUCuAGAAGGcAAAUcAcAdTdT | 1651 |
| AD-40020.1 | GuGAuuuGccuucuAGAAcdTdT | 1225 | GUUCuAGAAGGcAAAUcACdTdT | 1652 |
| AD-40026.1 | uGAuuuGccuucuAGAAcAdTdT | 1226 | UGUUCuAGAAGGcAAAUcAdTdT | 1653 |
| AD-40032.1 | GAuuuGccuucuAGAAcAGdTdT | 1227 | CUGUUCuAGAAGGcAAAUCdTdT | 1654 |
| AD-40038.1 | AuuuGccuucuAGAAcAGudTdT | 1228 | ACUGUUCuAGAAGGcAAAUdTdT | 1655 |
| AD-39997.1 | uuuGccuucuAGAAcAGuAdTdT | 1229 | uACUGUUCuAGAAGGcAAAdTdT | 1656 |
| AD-40009.1 | uGccuucuAGAAcAGuAGAdTdT | 1230 | UCuACUGUUCuAGAAGGcAdTdT | 1657 |
| AD-40015.1 | GccuucuAGAAcAGuAGAcdTdT | 1231 | GUCuACUGUUCuAGAAGGCdTdT | 1658 |
| AD-40021.1 | ccuucuAGAAcAGuAGAcAdTdT | 1232 | UGUCuACUGUUCuAGAAGGdTdT | 1659 |
| AD-40027.1 | cuucuAGAAcAGuAGAcAcdTdT | 1233 | GUGUCuACUGUUCuAGAAGdTdT | 1660 |
| AD-40033.1 | uucuAGAAcAGuAGAaAcAdTdT | 1234 | UGUGUCuACUGUUCuAGAAdTdT | 1661 |
| AD-40039.1 | ucuAGAAcAGuAGAcAcAAdTdT | 1235 | UUGUGUCuACUGUUCuAGAdTdT | 1662 |
| AD-40045.1 | cuAGAAcAGuAGAaAcAAAdTdT | 1236 | UUUGUGUCuACUGUUCuAGdTdT | 1663 |
| AD-40051.1 | nAGAAcAGuAGAcAcAAAAdTdT | 1237 | UUUUGUGUCuACUGUUCuAdTdT | 1664 |
| AD-40057.1 | AGAAcAGuAGAcAcAAAAcdTdT | 1238 | GUUUUGUGUCuACUGUUCUdTdT | 1665 |
| AD-40063.1 | GAAcAGuAGAcAcAAAAcAdTdT | 1239 | UGUUUUGUGUCuACUGUUCdTdT | 1666 |
| AD-40069.1 | AAcAGuAGAcAcAAAAcAGdTdT | 1240 | CUGUUUUGUGUCuACUGUUdTdT | 1667 |
| AD-40075.1 | AcAGuAGAcAcAAAAcAGGdTdT | 1241 | CCUGUUUUGUGUCuACUGUdTdT | 1668 |
| AD-40081.1 | aAGuAGAcAcAAAAcAGGcdTdT | 1242 | GCCUGUUUUGUGUCuACUGdTdT | 1669 |
| AD-40040.1 | AGuAGAcAcAAAAcAGGcudTdT | 1243 | AGCCUGUUUUGUGUCuACUdTdT | 1670 |
| AD-40046.1 | GuAGAcAcAAAAcAGGcucdTdT | 1244 | GAGCCUGUUUUGUGUCuACdTdT | 1671 |
| AD-40052.1 | nAGAcAcAAAAcAGGcucAdTdT | 1245 | UGAGCCUGUUUUGUGUCuAdTdT | 1672 |
| AD-40058.1 | AGAcAcAAAAcAGGcucAGdTdT | 1246 | CUGAGCCUGUUUUGUGUCUdTdT | 1673 |
| AD-40064.1 | GAcAcAAAAcAGGcucAGGdTdT | 1247 | CCUGAGCCUGUUUUGUGUCdTdT | 1674 |
| AD-40070.1 | AcAcAAAAcAGGcucAGGAdTdT | 1248 | UCCUGAGCCUGUUUUGUGUdTdT | 1675 |
| AD-40076.1 | aAcAAAAcAGGcucAGGAcdTdT | 1249 | GUCCUGAGCCUGUUUUGUGdTdT | 1676 |
| AD-40082.1 | AcAAAAcAGGcucAGGAcudTdT | 1250 | AGUCCUGAGCCUGUUUUGUdTdT | 1677 |
| AD-40041.1 | cAAAAcAGGcucAGGAcuudTdT | 1251 | AAGUCCUGAGCCUGUUUUGdTdT | 1678 |
| AD-40047.1 | AAAAcAGGcucAGGAcuuAdTdT | 1252 | uAAGUCCUGAGCCUGUUUUdTdT | 1679 |
| AD-40053.1 | AAAcAGGcucAGGAcuuAGdTdT | 1253 | CuAAGUCCUGAGCCUGUUUdTdT | 1680 |
| AD-40059.1 | AAcAGGcucAGGAcuuAGcdTdT | 1254 | GCuAAGUCCUGAGCCUGUUdTdT | 1681 |
| AD-40065.1 | AcAGGcucAGGAcuuAGcAdTdT | 1255 | UGCuAAGUCCUGAGCCUGUdTdT | 1682 |
| AD-40071.1 | cAGGcucAGGAcuuAGcAAdTdT | 1256 | UUGCuAAGUCCUGAGCCUGdTdT | 1683 |
| AD-40077.1 | AGGcucAGGAcuuAGcAAGdTdT | 1257 | CUUGCuAAGUCCUGAGCCUdTdT | 1684 |
| AD-40083.1 | GGcucAGGAcuuAGcAAGAdTdT | 1258 | UCUUGCuAAGUCCUGAGCCdTdT | 1685 |
| AD-40042.1 | GcucAGGAcuuAGcAAGAAdTdT | 1259 | UUCUUGCuAAGUCCUGAGCdTdT | 1686 |
| AD-40048.1 | cucAGGAcuuAGcAAGAAGdTdT | 1260 | CUUCUUGCuAAGUCCUGAGdTdT | 1687 |
| AD-40054.1 | ucAGGAcuuAGcAAGAAGudTdT | 1261 | ACUUCUUGCuAAGUCCUGAdTdT | 1688 |
| AD-40060.1 | cAGGAcuuAGcAAGAAGuudTdT | 1262 | AACUUCUUGCuAAGUCCUGdTdT | 1689 |
| AD-40066.1 | AGGAcuuAGcAAGAAGuuAdTdT | 1263 | uAACUUCUUGCuAAGUCCUdTdT | 1690 |
| AD-40072.1 | GGAcuuAGcAAGAAGuuAudTdT | 1264 | AuAACUUCUUGCuAAGUCCdTdT | 1691 |
| AD-40078.1 | GAcuuAGcAAGAAGuuAuGdTdT | 1265 | cAuAACUUCUUGCuAAGUCdTdT | 1692 |
| AD-40084.1 | AcuuAGcAAGAAGuuAuGGdTdT | 1266 | CcAuAACUUCUUGCuAAGUdTdT | 1693 |
| AD-40043.1 | cuuAGcAAGAAGuuAuGGAdTdT | 1267 | UCcAuAACUUCUUGCuAAGdTdT | 1694 |
| AD-40049.1 | uuAGcAAGAAGuuAuGGAAdTdT | 1268 | UUCcAuAACUUCUUGCuAAdTdT | 1695 |
| AD-40055.1 | uAGcAAGAAGuuAuGGAAudTdT | 1269 | AUUCcAuAACUUCUUGCuAdTdT | 1696 |
| AD-40061.1 | AGcAAGAAGuuAuGGAAuudTdT | 1270 | AAUUCcAuAACUUCUUGCUdTdT | 1697 |
| AD-40067.1 | GcAAGAAGuuAuGGAAuucdTdT | 1271 | GAAUUCcAuAACUUCUUGCdTdT | 1698 |
| AD-40073.1 | cAAGAAGuuAuGGAAuuccdTdT | 1272 | GGAAUUCcAuAACUUCUUGdTdT | 1699 |
| AD-40079.1 | AAGAAGuuAuGGAAuuccudTdT | 1273 | AGGAAUUCcAuAACUUCUUdTdT | 1700 |
| AD-40085.1 | AGAAGuuAuGGAAuuccuudTdT | 1274 | AAGGAAUUCcAuAACUUCUdTdT | 1701 |
| AD-40044.1 | GAAGuuAuGGAAuuccuuudTdT | 1275 | AAAGGAAUUCcAuAACUUCdTdT | 1702 |
| AD-40050.1 | AAGuuAuGGAAuuccuuuudTdT | 1276 | AAAAGGAAUUCcAuAACUUdTdT | 1703 |
| AD-40056.1 | AGuuAuGGAAuuccuuuuAdTdT | 1277 | uAAAAGGAAUUCcAuAACUdTdT | 1704 |
| AD-40062.1 | GuuAuGGAAuuccuuuuAudTdT | 1278 | AuAAAAGGAAUUCcAuAACdTdT | 1705 |
| AD-40068.1 | uuAuGGAAuuccuuuuAuudTdT | 1279 | AAuAAAAGGAAUUCcAuAAdTdT | 1706 |
| AD-40074.1 | uAuGGAAuuccuuuuAuuGdTdT | 1280 | cAAuAAAAGGAAUUCcAuAdTdT | 1707 |
| AD-40080.1 | AuGGAAuuccuuuuAuuGAdTdT | 1281 | UcAAuAAAAGGAAUUCcAUdTdT | 1708 |
| AD-39720.1 | ActtGtGGtAGttGGAGcttt | 1792 | AGCTCcAACtACcAcAAGTtt | 1830 |
| AD-39706.1 | GcAAGAGtGccttGAcGAttt | 1793 | ATCGTcAAGGcACTCTTGCtt | 1831 |
| AD-39712.1 | cAAGAGtGccttGAcGAtAtt | 1794 | tATCGTcAAGGcACTCTTGtt | 1832 |
| AD-39760.1 | ccttGAcGAtAcAGctAAttt | 1795 | ATtAGCTGtATCGTcAAGGtt | 1833 |
| AD-39732.1 | cAGctAAttcAGAAtcAtttt | 1796 | AATGATTCTGAATtAGCTGtt | 1834 |
| AD-35541.4 | cGAAtAtGAtccAAcAAtAtt | 1797 | tATTGTTGGATcAtATTCGtt | 1835 |
| AD-39735.1 | GGAAGcAAGtAGtAAttGAuu | 1798 | TcAATtACtACTTGCTTCCuu | 1836 |
| or hs_KRAS | | | | |
| 321_A22S26 | | | | |
| AD-39741.1 | GAAGcAAGtAGtAAttGAtuu | 1799 | ATcAATtACtACTTGCTTCuu | 1837 |
| or hs_KRAS | | | | |
| 322_A22S26 | | | | |
| AD-39778.1 | AGtAGtAAttGAtGGAGAAtt | 1800 | TTCTCcATcAATtACtACTtt | 1838 |
| AD-39790.1 | tAGtAAttGAtGGAGAAActt | 1801 | GTTTCTCcATcAATtACtAtt | 1839 |
| AD-39822.1 | GtctcttGGAtAttctcGAtt | 1802 | TCGAGAAtATCcAAGAGACtt | 1840 |
| AD-35609.4 | GGGctttctttGtGtAttttt | 1803 | AAAtAcAcAAAGAAAGCCCtt | 1841 |
| AD-35581.4 | GtGtAtttGccAtAAAtAAtt | 1804 | TtATTtATGGcAAAtAcACtt | 1842 |
| AD-39845.1 | ccAtAAAtAAtActAAAtctt | 1805 | GATTtAGtATtATTtATGGtt | 1843 |
| AD-39858.1 | tActAAAtcAtttGAAGAttt | 1806 | ATCTTcAAATGATTtAGtAtt | 1844 |
| AD-39870.1 | ctAAAtcAtttGAAGAtAtuu | 1807 | AtATCTTcAAATGATTtAGuu | 1845 |
| AD-35576.4 | GAAGAtAttcAccAttAtAtt | 1808 | tAtAATGGTGAAtATCTTCtt | 1846 |
| AD-35588.4 | AGAtAttcAccAttAtAGAtt | 1809 | TCtAtAATGGTGAAtATCTtt | 1847 |
| AD-35600.1 | AtAttcAccAttAtAGAGAtt | 1810 | TCTCtAtAATGGTGAAtATtt | 1848 |
| AD-35606.1 | tAttcAccAttAtAGAGAAtt | 1811 | TTCTCtAtAATGGTGAAtAtt | 1849 |
| AD-38151.1 | aAttAtAGAGAAcAAAttAtt | 1812 | tAATTTGTTCTCtAtAATGtt | 1850 |
| AD-38163.1 | ttAtAGAGAAcAAAttAAAtt | 1813 | TTtAATTTGTTCTCtAtAAtt | 1851 |
| AD-39999.1 | GAGttAAGGActctGAAGAtt | 1814 | TCTTcAGAGTCCTtAACTCtt | 1852 |
| AD-38159.1 | ctAtGGtcctAGtAGGAAAuu | 1815 | TTTCCtACtAGGACcAtAGuu | 1853 |
| or hs KRAS | | | | |
| 528_A22S26 | | | | |
| AD-38130.1 | tGGtcctAGtAGGAAAtAAuu | 1816 | TtATTTCCtACtAGGACcAuu | 1854 |
| or hs KRAS | | | | |
| 531_A22S26 | | | | |
| AD-38136.1 | GGtcctAGtAGGAAAtAAAtt | 1817 | TTtATTTCCtACtAGGACCtt | 1855 |
| AD-40036.1 | GtAGGAAAtAAAtGtGAtttt | 1818 | AATcAcATTtATTTCCtACtt | 1856 |
| AD-40008.1 | AtGtGAtttGccttctAGAtt | 1819 | TCtAGAAGGcAAATcAcATtt | 1857 |
| AD-40021.1 | ccttctAGAAcAGtAGAcAtt | 1820 | TGTCtACTGTTCtAGAAGGtt | 1858 |
| AD-40077.1 | AGGctcAGGActtAGcAAGtt | 1821 | CTTGCtAAGTCCTGAGCCTtt | 1859 |
| AD-40072.1 | GGActtAGcAAGAAGttAttt | 1822 | AtAACTTCTTGCtAAGTCCtt | 1860 |
| AD-40061.1 | AGcAAGAAGttAtGGAAtttt | 1823 | AATTCcAtAACTTCTTGCTtt | 1861 |
| AD-40068.1 | ttAtGGAAttccttttAtttt | 1824 | AAtAAAAGGAATTCcAtAAtt | 1862 |
| AD-38131.1 | GGAAttccttttAttGAAAtt | 1825 | TTTcAAtAAAAGGAATTCCtt | 1863 |
| AD-38167.1 | ccttttAttGAAAcAtcAGtt | 1826 | CTGATGTTTcAAtAAAAGGtt | 1864 |
| hs_KRAS | cctGAtGAAtGtAAAGttAuu | 1827 | tAACTTtAcATTcATcAGGuu | 1865 |
| 1273_A22S26 | | | | |
| hs_KRAS | GGAGAAt ttAAtAAAGAtAuu | 1828 | TATCTTtATtAAATTCTCCuu | 1866 |
| 2892_A37S26 | | | | |
| hs_KRAS | GAAtAGtcAtAActAGAttuu | 1829 | AATCtAGTtATGACtATTCuu | 1867 |
| 4731_A22S26 | | | | |

[3539] Modifications of the sequences of RNAi agents are easily conceived by one of skill in the art. Examples and non-limiting modifications of these sequences are conceived and are also listed in Table 3. Note for example, that many sequences end with a terminal dTdT. This is a variant of the TT terminal overhang known to protect siRNAs from nuclease degradation (e.g., in blood serum or intestinal fluid).

[3540] The dTdT or TT terminal overhangs are optional, they can be replaced by various types of 3′ end caps, provided that the 3′ end caps are capable of both mediating nuclease resistance and allowing siRNA activity.

[3541] Some modifications are placed at sites predicted to be sensitive to endonucleases. Some modifications are designed to eliminate an immune response to the siRNA while preserving activity. In general, the sense strand is heavily modified, and the antisense strand lightly modified. Some modifications serve more than one purpose.

[3542] The sequences in Table s 1 to 3 are represented by these abbreviations:

TABLE 1A
ABBREVIATIONS

| Abbreviation | Nucleotide(s) |
|---|---|
| A | adenosine-5′-phosphate |
| C | cytidine-5′-phosphate |
| G | guanosine-5′-phosphate |
| dT | 2′-deoxy-thymidine-5′-phosphate |
| U | uridine-5′-phosphate |
| c | 2′-O-methylcytidine-5′-phosphate |
| u | 2′-O-methyluridine-5′-phosphate |
| sdT | 2′-deoxy Thymidine 5′-phosphorothioate |

siRNA Sequence Selection

[3543] Sense and antisense human SCNNB1-derived siRNA oligos (RNAi agents to KRAS) are synthesized, as described herein. The sense and their respective antisense oligos are annealed into duplexes.

### Example 2

### Overlapping Sets of KRAS RNAi Agents

[3544] The present disclosure also relates to groups of RNAi agents to KRAS with overlapping sequences. Thus, the present disclosure encompasses groups of RNAi agents wherein each RNAi agent in the group overlaps with each other RNAi agent in the same group by at least 5, 6, 7, 8, 9, 10, 11, 12, 13, 14, 15, 16, 17, 18, 19 or more nucleotides. Particularly, in one embodiment, the overlap is at least 12 nt.

[3545] Some of the RNAi agents listed herein overlap each other in sequence. Table 4 presents a compilation of some of these groups of overlapping RNAi agents, wherein each member of a group overlaps with each other member of the same group by at least 12 nt. A 12-nt portion of the overlap of the sense and anti-sense strand are presented.

[3546] Thus, for example, as shown in Table 4, the sequences of duplexes AD-39695.1, AD-39689.1, AD-39707.1, AD-39683.1, and AD-39701.1 all overlap, wherein the overlap in sense strand comprises the sequence CUGAAUAUAAAC (SEQ ID NO: 1874) and the overlap in the anti-sense strand comprises the sequence GUUUAUAUUCAG (SEQ ID NO: 1875).

[3547] However, in the present disclosure encompasses any set or subset or group or subgroup of KRAS RNAi agents which share the common technical feature of a sequence overlap (e.g., by at least 12 nt). Thus the present disclosure also encompasses the example groups of AD-39695.1, AD-39689.1, AD-39707.1, AD-39683.1, and AD-39701.1, but also these subgroups: AD-39695.1 and AD-39689.1; AD-39695.1 and AD-39707.1; AD-39695.1, AD-39689.1, and AD-39701.1; AD-39689.1, AD-39707.1, and AD-39701.1; AD-39707.1 and AD-39683.1; AD-39707.1, AD-39683.1, and AD-39701.1; etc, and any other group of overlapping KRAS RNAi agents.

TABLE 4
Overlapping sets of KRAS RNAi agents

| | SEQ | | SEQ | |
|---|---|---|---|---|
| | ID | Anti-sense | ID | |
| Sense overlap | NO: | overlap | NO: | Overlapping RNAi agents to KRAS |
| UGACUGAAUAUA | 1868 | UAUAUUCAGUCA | 1869 | AD-39689.1, AD-39683.1 |
| GACUGAAUAUAA | 1870 | UUAUAUUCAGuc | 1871 | AD-39695.1, AD-39689.1, AD-39683.1 |
| ACUGAAUAUAAA | 1872 | UUUAUAUUCAGU | 1873 | AD-39695.1, AD-39689.1, AD-39683.1, AD-39701.1 |
| CUGAAUAUAAAC | 1874 | GUUUAUAUUCAG | 1875 | AD-39695.1, AD-39689.1, AD-39707.1, AD- |
| | | | | 39683.1, AD-39701.1 |
| UGAAUAUAAACU | 1876 | AGUUUAUAUUCA | 1877 | AD-39695.1, AD-39689.1, AD-39713.1, AD- |
| | | | | 39707.1, AD-39683.1, AD-39701.1 |
| GAAUAUAAACUU | 1878 | AAGUUUAUAUuc | 1879 | AD-39695.1, AD-39689.1, AD-39713.1, AD- |
| | | | | 39707.1, AD-39683.1, AD-39701.1, AD-39719.1 |
| AAUAUAAACUUG | 1880 | CAAGUUUAUAUU | 1881 | AD-39695.1, AD-39689.1, AD-39713.1, AD- |
| | | | | 39707.1, AD-39683.1, AD-39701.1, AD-39725.1, AD- |
| | | | | 39719.1 |
| AUAUAAACUUGU | 1882 | ACAAGUUUAUAU | 1883 | AD-39695.1, AD-39689.1, AD-39713.1, AD- |
| | | | | 39707.1, AD-39701.1, AD-39725.1, AD-39719.1, AD- |
| | | | | 39684.1 |
| UAUAAACUUGUG | 1884 | CACAAGUUUAUA | 1885 | AD-39690.1, AD-39695.1, AD-39713.1, AD- |
| | | | | 39707.1, AD-39701.1, AD-39725.1, AD-39719.1, AD- |
| | | | | 39684.1 |
| AUAAACUUGUGG | 1886 | CCACAAGUUUAU | 1887 | AD-39690.1, AD-39713.1, AD-39707.1, AD- |
| | | | | 39701.1, AD-39725.1, AD-39719.1, AD-39684.1, AD- |
| | | | | 39696.1 |
| UAAACUUGUGGU | 1888 | ACCACAAGUUUA | 1889 | AD-39690.1, AD-39713.1, AD-39707.1, AD- |
| | | | | 39725.1, AD-39702.1, AD-39719.1, AD-39684.1, AD- |
| | | | | 39696.1 |
| AAACUUGUGGUA | 1890 | UACCACAAGUUU | 1891 | AD-39690.1, AD-39713.1, AD-39725.1, AD- |
| | | | | 39702.1, AD-39719.1, AD-39684.1, AD-39696.1, AD- |
| | | | | 39708.1 |
| AACUUGUGGUAG | 1892 | CUACCACAAGUU | 1893 | AD-39690.1, AD-39725.1, AD-39702.1, AD- |
| | | | | 39719.1, AD-39684.1, AD-39714.1, AD-39696.1, AD- |
| | | | | 39708.1 |
| ACUUGUGGUAGU | 1894 | ACUACCACAAGU | 1895 | AD-39690.1, AD-39725.1, AD-39702.1, AD- |
| | | | | 39684.1, AD-39714.1, AD-39696.1, AD-39708.1, AD- |
| | | | | 39720.1 |
| CUUGUGGUAGUU | 1896 | AACUACCACAAG | 1897 | AD-39690.1, AD-39702.1, AD-39684.1, AD- |
| | | | | 39714.1, AD-39696.1, AD-39708.1, AD-39720.1, AD- |
| | | | | 39726.1 |
| UUGUGGUAGUUG | 1898 | CAACUACCACAA | 1899 | AD-39690.1, AD-39702.1, AD-39714.1, AD- |
| | | | | 39696.1, AD-39708.1, AD-39720.1, AD-39726.1, AD- |
| | | | | 39685.1 |
| UGUGGUAGUUGG | 1900 | CCAACUACCACA | 1901 | AD-39691.1, AD-39702.1, AD-39714.1, AD- |
| | | | | 39696.1, AD-39708.1, AD-39720.1, AD-39726.1, AD- |
| | | | | 39685.1 |
| GUGGUAGUUGGA | 1902 | UCCAACUACCAC | 1903 | AD-39691.1, AD-39697.1, AD-39702.1, AD- |
| | | | | 39714.1, AD-39708.1, AD-39720.1, AD-39726.1, AD- |
| | | | | 39685.1 |
| UGGUAGUUGGAG | 1904 | CUCCAACUACCA | 1905 | AD-39703.1, AD-39691.1, AD-39697.1, AD- |
| | | | | 39714.1, AD-39708.1, AD-39720.1, AD-39726.1, AD- |
| | | | | 39685.1 |
| GGUAGUUGGAGC | 1906 | GCUCCAACUACC | 1907 | AD-39703.1, AD-39691.1, AD-39697.1, AD- |
| | | | | 39714.1, AD-39709.1, AD-39720.1, AD-39726.1, AD- |
| | | | | 39685.1 |
| GUAGUUGGAGCU | 1908 | AGCUCCAACUAC | 1909 | AD-39703.1, AD-39691.1, AD-39697.1, AD- |
| | | | | 39715.1, AD-39709.1, AD-39720.1, AD-39726.1, AD- |
| | | | | 39685.1 |
| UAGUUGGAGCUG | 1910 | CAGCUCCAACUA | 1911 | AD-39703.1, AD-39691.1, AD-39697.1, AD- |
| | | | | 39715.1, AD-39709.1, AD-39721.1, AD-39726.1, AD- |
| | | | | 39685.1 |
| AGUUGGAGCUGG | 1912 | CCAGCUCCAACU | 1913 | AD-39703.1, AD-39691.1, AD-39697.1, AD- |
| | | | | 39715.1, AD-39709.1, AD-39721.1, AD-39727.1, AD- |
| | | | | 39685.1 |
| GUUGGAGCUGGU | 1914 | ACCAGCUCCAAC | 1915 | AD-39703.1, AD-39691.1, AD-39686.1, AD- |
| | | | | 39697.1, AD-39715.1, AD-39709.1, AD-39721.1, AD- |
| | | | | 39727.1 |
| UUGGAGCUGGUG | 1916 | CACCAGCUCCAA | 1917 | AD-39703.1, AD-39686.1, AD-39697.1, AD- |
| | | | | 39692.1, AD-39715.1, AD-39709.1, AD-39721.1, AD- |
| | | | | 39727.1 |
| UGGAGCUGGUGG | 1918 | CCACCAGCUCCA | 1919 | AD-39703.1, AD-39686.1, AD-39692.1, AD- |
| | | | | 39715.1, AD-39709.1, AD-39698.1, AD-39721.1, AD- |
| | | | | 39727.1 |
| GGAGCUGGUGGC | 1920 | GCCACCAGCUCC | 1921 | AD-39686.1, AD-39692.1, AD-39715.1, AD- |
| | | | | 39709.1, AD-39698.1, AD-39721.1, AD-39704.1, AD- |
| | | | | 39727.1 |
| GAGCUGGUGGCG | 1922 | CGCCACCAGCUC | 1923 | AD-39710.1, AD-39686.1, AD-39692.1, AD- |
| | | | | 39715.1, AD-39698.1, AD-39721.1, AD-39704.1, AD- |
| | | | | 39727.1 |
| AGCUGGUGGCGU | 1924 | ACGCCACCAGCU | 1925 | AD-39710.1, AD-39686.1, AD-39692.1, AD- |
| | | | | 39716.1, AD-39698.1, AD-39721.1, AD-39704.1, AD- |
| | | | | 39727.1 |
| GCUGGUGGCGUA | 1926 | UACGCCACCAGC | 1927 | AD-39710.1, AD-39686.1, AD-39692.1, AD- |
| | | | | 39722.1, AD-39716.1, AD-39698.1, AD-39704.1, AD- |
| | | | | 39727.1 |
| CUGGUGGCGUAG | 1928 | CUACGCCACCAG | 1929 | AD-39710.1, AD-39686.1, AD-39692.1, AD- |
| | | | | 39722.1, AD-39716.1, AD-39728.1, AD-39698.1, AD- |
| | | | | 39704.1 |
| UGGUGGCGUAGG | 1930 | CCUACGCCACCA | 1931 | AD-39710.1, AD-39687.1, AD-39692.1, AD- |
| | | | | 39722.1, AD-39716.1, AD-39728.1, AD-39698.1, AD- |
| | | | | 39704.1 |
| GGUGGCGUAGGC | 1932 | GCCUACGCCACC | 1933 | AD-39693.1, AD-39710.1, AD-39687.1, AD- |
| | | | | 39722.1, AD-39716.1, AD-39728.1, AD-39698.1, AD- |
| | | | | 39704.1 |
| GUGGCGUAGGCA | 1934 | UGCCUACGCCAC | 1935 | AD-39693.1, AD-39710.1, AD-39699.1, AD- |
| | | | | 39687.1, AD-39722.1, AD-39716.1, AD-39728.1, AD- |
| | | | | 39704.1 |
| UGGCGUAGGCAA | 1936 | UUGCCUACGCCA | 1937 | AD-39693.1, AD-39710.1, AD-39699.1, AD- |
| | | | | 39687.1, AD-39722.1, AD-39716.1, AD-39705.1, AD- |
| | | | | 39728.1 |
| GGCGUAGGCAAG | 1938 | CUUGCCUACGCC | 1939 | AD-39693.1, AD-39699.1, AD-39687.1, AD- |
| | | | | 39711.1, AD-39722.1, AD-39716.1, AD-39705.1, AD- |
| | | | | 39728.1 |
| GCGUAGGCAAGA | 1940 | UCUUGCCUACGC | 1941 | AD-39693.1, AD-39699.1, AD-39687.1, AD- |
| | | | | 39717.1, AD-39711.1, AD-39722.1, AD-39705.1, AD- |
| | | | | 39728.1 |
| CGUAGGCAAGAG | 1942 | CUCUUGCCUACG | 1943 | AD-39693.1, AD-39699.1, AD-39687.1, AD- |
| | | | | 39717.1, AD-39711.1, AD-39705.1, AD-39728.1, AD- |
| | | | | 39723.1 |
| GUAGGCAAGAGU | 1944 | ACUCUUGCCUAC | 1945 | AD-39693.1, AD-39699.1, AD-39687.1, AD- |
| | | | | 39717.1, AD-39711.1, AD-39729.1, AD-39705.1, AD- |
| | | | | 39723.1 |
| UAGGCAAGAGUG | 1946 | CACUCUUGCCUA | 1947 | AD-39693.1, AD-39699.1, AD-39717.1, AD- |
| | | | | 39711.1, AD-39688.1, AD-39729.1, AD-39705.1, AD- |
| | | | | 39723.1 |
| AGGCAAGAGUGC | 1948 | GCACUCUUGCCU | 1949 | AD-39699.1, AD-39717.1, AD-39711.1, AD- |
| | | | | 39688.1, AD-39729.1, AD-39705.1, AD-39694.1, AD- |
| | | | | 39723.1 |
| GGCAAGAGUGCC | 1950 | GGCACUCUUGCC | 1951 | AD-39717.1, AD-39711.1, AD-39688.1, AD- |
| | | | | 39729.1, AD-39705.1, AD-39694.1, AD-39700.1, AD- |
| | | | | 39723.1 |
| GCAAGAGUGCCU | 1952 | AGGCACUCUUGC | 1953 | AD-39717.1, AD-39711.1, AD-39688.1, AD- |
| | | | | 39729.1, AD-39706.1, AD-39694.1, AD-39700.1, AD- |
| | | | | 39723.1 |
| CAAGAGUGCCUU | 1954 | AAGGCACUCUUG | 1955 | AD-39712.1, AD-39717.1, AD-39688.1, AD- |
| | | | | 39729.1, AD-39706.1, AD-39694.1, AD-39700.1, AD- |
| | | | | 39723.1 |
| AAGAGUGCCUUG | 1956 | CAAGGCACUCUU | 1957 | AD-39718.1, AD-39712.1, AD-39688.1, AD- |
| | | | | 39729.1, AD-39706.1, AD-39694.1, AD-39700.1, AD- |
| | | | | 39723.1 |
| AGAGUGCCUUGA | 1958 | UCAAGGCACUCU | 1959 | AD-39718.1, AD-39712.1, AD-39724.1, AD- |
| | | | | 39688.1, AD-39729.1, AD-39706.1, AD-39694.1, AD- |
| | | | | 39700.1 |
| GAGUGCCUUGAC | 1960 | GUCAAGGCACUC | 1961 | AD-39718.1, AD-39712.1, AD-39724.1, AD- |
| | | | | 39688.1, AD-39706.1, AD-39694.1, AD-39700.1, AD- |
| | | | | 39730.1 |
| AGUGCCUUGACG | 1962 | CGUCAAGGCACU | 1963 | AD-39718.1, AD-39712.1, AD-39724.1, AD- |
| | | | | 39706.1, AD-39694.1, AD-39736.1, AD-39700.1, AD- |
| | | | | 39730.1 |
| GUGCCUUGACGA | 1964 | UCGUCAAGGCAC | 1965 | AD-39718.1, AD-39712.1, AD-39724.1, AD- |
| | | | | 39742.1, AD-39706.1, AD-39736.1, AD-39700.1, AD- |
| | | | | 39730.1 |
| UGCCUUGACGAU | 1966 | AUCGUCAAGGCA | 1967 | AD-39718.1, AD-39712.1, AD-39724.1, AD- |
| | | | | 39742.1, AD-39706.1, AD-39736.1, AD-39748.1, AD- |
| | | | | 39730.1 |
| GCCUUGACGAUA | 1968 | UAUCGUCAAGGC | 1969 | AD-39718.1, AD-39712.1, AD-39724.1, AD- |
| | | | | 39742.1, AD-39754.1, AD-39736.1, AD-39748.1, AD- |
| | | | | 39730.1 |
| CCUUGACGAUAC | 1970 | GUAUCGUCAAGG | 1971 | AD-39718.1, AD-39724.1, AD-39742.1, AD- |
| | | | | 39754.1, AD-39736.1, AD-39748.1, AD-39760.1, AD- |
| | | | | 39730.1 |
| CUUGACGAUACA | 1972 | UGUAUCGUCAAG | 1973 | AD-39724.1, AD-39742.1, AD-39754.1, AD- |
| | | | | 39736.1, AD-39748.1, AD-39760.1, AD-39730.1, AD- |
| | | | | 39766.1 |
| UUGACGAUACAG | 1974 | CUGUAUCGUCAA | 1975 | AD-39742.1, AD-39772.1, AD-39754.1, AD- |
| | | | | 39736.1, AD-39748.1, AD-39760.1, AD-39730.1, AD- |
| | | | | 39766.1 |
| UGACGAUACAGC | 1976 | GCUGUAUCGUCA | 1977 | AD-39742.1, AD-39772.1, AD-39754.1, AD- |
| | | | | 39736.1, AD-39731.1, AD-39748.1, AD-39760.1, AD- |
| | | | | 39766.1 |
| GACGAUACAGCU | 1978 | AGCUGUAUCGUC | 1979 | AD-39737.1, AD-39742.1, AD-39772.1, AD- |
| | | | | 39754.1, AD-39731.1, AD-39748.1, AD-39760.1, AD- |
| | | | | 39766.1 |
| ACGAUACAGCUA | 1980 | UAGCUGUAUCGU | 1981 | AD-39737.1, AD-39772.1, AD-39754.1, AD- |
| | | | | 39743.1, AD-39731.1, AD-39748.1, AD-39760.1, AD- |
| | | | | 39766.1 |
| CGAUACAGCUAA | 1982 | UUAGCUGUAUCG | 1983 | AD-39737.1, AD-39772.1, AD-39754.1, AD- |
| | | | | 39743.1, AD-39731.1, AD-39760.1, AD-39749.1, AD- |
| | | | | 39766.1 |
| GAUACAGCUAAU | 1984 | AUUAGCUGUAUC | 1985 | AD-39737.1, AD-39772.1, AD-39743.1, AD- |
| | | | | 39731.1, AD-39760.1, AD-39749.1, AD-39755.1, AD- |
| | | | | 39766.1 |
| AUACAGCUAAUU | 1986 | AAUUAGCUGUAU | 1987 | AD-39761.1, AD-39737.1, AD-39772.1, AD- |
| | | | | 39743.1, AD-39731.1, AD-39749.1, AD-39755.1, AD- |
| | | | | 39766.1 |
| UACAGCUAAUUC | 1988 | GAAUUAGCUGUA | 1989 | AD-39767.1, AD-39761.1, AD-39737.1, AD- |
| | | | | 39772.1, AD-39743.1, AD-39731.1, AD-39749.1, AD- |
| | | | | 39755.1 |
| ACAGCUAAUUCA | 1990 | UGAAUUAGCUGU | 1991 | AD-39767.1, AD-39761.1, AD-39737.1, AD- |
| | | | | 39743.1, AD-39731.1, AD-39773.1, AD-39749.1, AD- |
| | | | | 39755.1 |
| CAGCUAAUUCAG | 1992 | CUGAAUUAGCUG | 1993 | AD-39767.1, AD-39761.1, AD-39737.1, AD- |
| | | | | 39732.1, AD-39743.1, AD-39773.1, AD-39749.1, AD- |
| | | | | 39755.1 |
| AGCUAAUUCAGA | 1994 | UCUGAAUUAGCU | 1995 | AD-39767.1, AD-39761.1, AD-39732.1, AD- |
| | | | | 39743.1, AD-39738.1, AD-39773.1, AD-39749.1, AD- |
| | | | | 39755.1 |
| GCUAAUUCAGAA | 1996 | UUCUGAAUUAGC | 1997 | AD-39767.1, AD-39761.1, AD-39744.1, AD- |
| | | | | 39732.1, AD-39738.1, AD-39773.1, AD-39749.1, AD- |
| | | | | 39755.1 |
| CUAAUUCAGAAU | 1998 | AUUCUGAAUUAG | 1999 | AD-39767.1, AD-39761.1, AD-39744.1, AD- |
| | | | | 39732.1, AD-39750.1, AD-39738.1, AD-39773.1, AD- |
| | | | | 39755.1 |
| UAAUUCAGAAUC | 2000 | GAUUCUGAAUUA | 2001 | AD-39756.1, AD-39767.1, AD-39761.1, AD- |
| | | | | 39744.1, AD-39732.1, AD-39750.1, AD-39738.1, AD- |
| | | | | 39773.1 |
| AAUUCAGAAUCA | 2002 | UGAUUCUGAAUU | 2003 | AD-39756.1, AD-39767.1, AD-39744.1, AD- |
| | | | | 39762.1, AD-39732.1, AD-39750.1, AD-39738.1, AD- |
| | | | | 39773.1 |
| AUUCAGAAUCAU | 2004 | AUGAUUCUGAAU | 2005 | AD-39756.1, AD-39744.1, AD-39762.1, AD- |
| | | | | 39732.1, AD-39768.1, AD-39750.1, AD-39738.1, AD- |
| | | | | 39773.1 |
| UUCAGAAUCAUU | 2006 | AAUGAUUCUGAA | 2007 | AD-39756.1, AD-39774.1, AD-39744.1, AD- |
| | | | | 39762.1, AD-39732.1, AD-39768.1, AD-39750.1, AD- |
| | | | | 39738.1 |
| UCAGAAUCAUUU | 2008 | AAAUGAUUCUGA | 2009 | AD-39756.1, AD-39774.1, AD-39744.1, AD- |
| | | | | 39762.1, AD-39733.1, AD-39768.1, AD-39750.1, AD- |
| | | | | 39738.1 |
| CAGAAUCAUUUU | 2010 | AAAAUGAUUCUG | 2011 | AD-39756.1, AD-39739.1, AD-39774.1, AD- |
| | | | | 39744.1, AD-39762.1, AD-39733.1, AD-39768.1, AD- |
| | | | | 39750.1 |
| AGAAUCAUUUUG | 2012 | CAAAAUGAUUCU | 2013 | AD-39745.1, AD-39756.1, AD-39739.1, AD- |
| | | | | 39774.1, AD-39762.1, AD-39733.1, AD-39768.1, AD- |
| | | | | 39750.1 |
| GAAUCAUUUUGU | 2014 | ACAAAAUGAUUC | 2015 | AD-39745.1, AD-39756.1, AD-39739.1, AD- |
| | | | | 39774.1, AD-39762.1, AD-39733.1, AD-39768.1, AD- |
| | | | | 39751.1 |
| AAUCAUUUUGUG | 2016 | CACAAAAUGAUU | 2017 | AD-39745.1, AD-39739.1, AD-39774.1, AD- |
| | | | | 39757.1, AD-39762.1, AD-39733.1, AD-39768.1, AD- |
| | | | | 39751.1 |
| AUCAUUUUGUGG | 2018 | CCACAAAAUGAU | 2019 | AD-39745.1, AD-39739.1, AD-39774.1, AD- |
| | | | | 39757.1, AD-39733.1, AD-39768.1, AD-39751.1, AD- |
| | | | | 39763.1 |
| UCAUUUUGUGGA | 2020 | UCCACAAAAUGA | 2021 | AD-39745.1, AD-39739.1, AD-39774.1, AD- |
| | | | | 39757.1, AD-39733.1, AD-39751.1, AD-39769.1, AD- |
| | | | | 39763.1 |
| CAUUUUGUGGAC | 2022 | GUCCACAAAAUG | 2023 | AD-39745.1, AD-39739.1, AD-39775.1, AD- |
| | | | | 39757.1, AD-39733.1, AD-39751.1, AD-39769.1, AD- |
| | | | | 39763.1 |
| AUUUUGUGGACG | 2024 | CGUCCACAAAAU | 2025 | AD-39745.1, AD-39739.1, AD-39775.1, AD- |
| | | | | 39757.1, AD-39751.1, AD-39769.1, AD-39763.1, AD- |
| | | | | 39734.1 |
| UUUUGUGGACGA | 2026 | UCGUCCACAAAA | 2027 | AD-39745.1, AD-39775.1, AD-39757.1, AD- |
| | | | | 39751.1, AD-39769.1, AD-39740.1, AD-39763.1, AD- |
| | | | | 39734.1 |
| UUUGUGGACGAA | 2028 | UUCGUCCACAAA | 2029 | AD-39775.1, AD-39746.1, AD-39757.1, AD- |
| | | | | 39751.1, AD-39769.1, AD-39740.1, AD-39763.1, AD- |
| | | | | 39734.1 |
| UUGUGGACGAAU | 2030 | AUUCGUCCACAA | 2031 | AD-39752.1, AD-39775.1, AD-39746.1, AD- |
| | | | | 39757.1, AD-39769.1, AD-39740.1, AD-39763.1, AD- |
| | | | | 39734.1 |
| UGUGGACGAAUA | 2032 | UAUUCGUCCACA | 2033 | AD-39752.1, AD-39775.1, AD-39746.1, AD- |
| | | | | 39758.1, AD-39769.1, AD-39740.1, AD-39763.1, AD- |
| | | | | 39734.1 |
| GUGGACGAAUAU | 2034 | AUAUUCGUCCAC | 2035 | AD-39752.1, AD-39775.1, AD-39764.1, AD- |
| | | | | 39746.1, AD-39758.1, AD-39769.1, AD-39740.1, AD- |
| | | | | 39734.1 |
| UGGACGAAUAUG | 2036 | CAUAUUCGUCCA | 2037 | AD-39752.1, AD-39775.1, AD-39764.1, AD- |
| | | | | 39746.1, AD-39770.1, AD-39758.1, AD-39740.1, AD- |
| | | | | 39734.1 |
| GGACGAAUAUGA | 2038 | UCAUAUUCGUCC | 2039 | AD-39752.1, AD-35523.3, AD-39764.1, AD- |
| | | | | 39746.1, AD-39770.1, AD-39758.1, AD-39740.1, AD- |
| | | | | 39734.1 |
| GACGAAUAUGAU | 2040 | AUCAUAUUCGUC | 2041 | AD-39752.1, AD-35529.1, AD-35523.3, AD- |
| | | | | 39764.1, AD-39746.1, AD-39770.1, AD-39758.1, AD- |
| | | | | 39740.1 |
| ACGAAUAUGAUC | 2042 | GAUCAUAUUCGU | 2043 | AD-39752.1, AD-35529.1, AD-35523.3, AD- |
| | | | | 39764.1, AD-39746.1, AD-35535.4, AD-39770.1, AD- |
| | | | | 39758.1 |
| CGAAUAUGAUCC | 2044 | GGAUCAUAUUCG | 2045 | AD-39752.1, AD-35529.1, AD-35523.3, AD- |
| | | | | 35541.4, AD-39764.1, AD-35535.4, AD-39770.1, AD- |
| | | | | 39758.1 |
| GAAUAUGAUCCA | 2046 | UGGAUCAUAUUC | 2047 | AD-35529.1, AD-35523.3, AD-35541.4, AD- |
| | | | | 39764.1, AD-35535.4, AD-39770.1, AD-39758.1, AD- |
| | | | | 35547.4 |
| AAUAUGAUCCAA | 2048 | UUGGAUCAUAUU | 2049 | AD-35529.1, AD-35523.3, AD-35541.4, AD- |
| | | | | 39764.1, AD-35535.4, AD-39770.1, AD-35553.4, AD- |
| | | | | 35547.4 |
| AUAUGAUCCAAC | 2050 | GUUGGAUCAUAU | 2051 | AD-35529.1, AD-35523.3, AD-35541.4, AD- |
| | | | | 35559.4, AD-35535.4, AD-39770.1, AD-35553.4, AD- |
| | | | | 35547.4 |
| UAUGAUCCAACA | 2052 | UGUUGGAUCAUA | 2053 | AD-35529.1, AD-35523.3, AD-35541.4, AD- |
| | | | | 35565.4, AD-35559.4, AD-35535.4, AD-35553.4, AD- |
| | | | | 35547.4 |
| AUGAUCCAACAA | 2054 | UUGUUGGAUCAU | 2055 | AD-35529.1, AD-35541.4, AD-35565.4, AD- |
| | | | | 35559.4, AD-35535.4, AD-35553.4, AD-35547.4, AD- |
| | | | | 35524.4 |
| UGAUCCAACAAU | 2056 | AUUGUUGGAUCA | 2057 | AD-35530.4, AD-35541.4, AD-35565.4, AD- |
| | | | | 35559.4, AD-35535.4, AD-35553.4, AD-35547.4, AD- |
| | | | | 35524.4 |
| GAUCCAACAAUA | 2058 | UAUUGUUGGAUC | 2059 | AD-35530.4, AD-35541.4, AD-35565.4, AD- |
| | | | | 35559.4, AD-35553.4, AD-35536.4, AD-35547.4, AD- |
| | | | | 35524.4 |
| AUCCAACAAUAG | 2060 | CUAUUGUUGGAU | 2061 | AD-35530.4, AD-35565.4, AD-35559.4, AD- |
| | | | | 35553.4, AD-35542.4, AD-35536.4, AD-35547.4, AD- |
| | | | | 35524.4 |
| UCCAACAAUAGA | 2062 | UCUAUUGUUGGA | 2063 | AD-35530.4, AD-35565.4, AD-35559.4, AD- |
| | | | | 35553.4, AD-35548.4, AD-35542.4, AD-35536.4, AD- |
| | | | | 35524.4 |
| CCAACAAUAGAG | 2064 | CUCUAUUGUUGG | 2065 | AD-35554.4, AD-35530.4, AD-35565.4, AD- |
| | | | | 35559.4, AD-35548.4, AD-35542.4, AD-35536.4, AD- |
| | | | | 35524.4 |
| CAACAAUAGAGG | 2066 | CCUCUAUUGUUG | 2067 | AD-35554.4, AD-35530.4, AD-35565.4, AD- |
| | | | | 35548.4, AD-35542.4, AD-35536.4, AD-35560.2, AD- |
| | | | | 35524.4 |
| AACAAUAGAGGA | 2068 | UCCUCUAUUGUU | 2069 | AD-35554.4, AD-35530.4, AD-35566.4, AD- |
| | | | | 35548.4, AD-35542.4, AD-35536.4, AD-35560.2, AD- |
| | | | | 35524.4 |
| ACAAUAGAGGAU | 2070 | AUCCUCUAUUGU | 2071 | AD-35554.4, AD-35530.4, AD-35525.2, AD- |
| | | | | 35566.4, AD-35548.4, AD-35542.4, AD-35536.4, AD- |
| | | | | 35560.2 |
| CAAUAGAGGAUU | 2072 | AAUCCUCUAUUG | 2073 | AD-35554.4, AD-35525.2, AD-35566.4, AD- |
| | | | | 35548.4, AD-35542.4, AD-35536.4, AD-35531.4, AD- |
| | | | | 35560.2 |
| AAUAGAGGAUUC | 2074 | GAAUCCUCUAUU | 2075 | AD-35554.4, AD-35525.2, AD-35537.4, AD- |
| | | | | 35566.4, AD-35548.4, AD-35542.4, AD-35531.4, AD- |
| | | | | 35560.2 |
| AUAGAGGAUUCC | 2076 | GGAAUCCUCUAU | 2077 | AD-35554.4, AD-35525.2, AD-35537.4, AD- |
| | | | | 35566.4, AD-35548.4, AD-35531.4, AD-35560.2, AD- |
| | | | | 35543.2 |
| UAGAGGAUUCCU | 2078 | AGGAAUCCUCUA | 2079 | AD-35549.4, AD-35554.4, AD-35525.2, AD- |
| | | | | 35537.4, AD-35566.4, AD-35531.4, AD-35560.2, AD- |
| | | | | 35543.2 |
| AGAGGAUUCCUA | 2080 | UAGGAAUCCUCU | 2081 | AD-35549.4, AD-35555.4, AD-35525.2, AD- |
| | | | | 35537.4, AD-35566.4, AD-35531.4, AD-35560.2, AD- |
| | | | | 35543.2 |
| GAGGAUUCCUAC | 2082 | GUAGGAAUCCUC | 2083 | AD-35549.4, AD-35555.4, AD-35525.2, AD- |
| | | | | 35537.4, AD-35566.4, AD-35531.4, AD-35561.4, AD- |
| | | | | 35543.2 |
| AGGAUUCCUACA | 2084 | UGUAGGAAUCCU | 2085 | AD-35549.4, AD-35555.4, AD-35525.2, AD- |
| | | | | 35537.4, AD-35531.4, AD-35561.4, AD-35543.2, AD- |
| | | | | 35567.4 |
| GGAUUCCUACAG | 2086 | CUGUAGGAAUCC | 2087 | AD-35549.4, AD-35555.4, AD-35526.4, AD- |
| | | | | 35537.4, AD-35531.4, AD-35561.4, AD-35543.2, AD- |
| | | | | 35567.4 |
| GAUUCCUACAGG | 2088 | CCUGUAGGAAUC | 2089 | AD-35549.4, AD-35555.4, AD-35532.4, AD- |
| | | | | 35526.4, AD-35537.4, AD-35561.4, AD-35543.2, AD- |
| | | | | 35567.4 |
| AUUCCUACAGGA | 2090 | UCCUGUAGGAAU | 2091 | AD-35549.4, AD-35555.4, AD-35532.4, AD- |
| | | | | 35526.4, AD-35538.4, AD-35561.4, AD-35543.2, AD- |
| | | | | 35567.4 |
| UUCCUACAGGAA | 2092 | UUCCUGUAGGAA | 2093 | AD-35549.4, AD-35555.4, AD-35532.4, AD- |
| | | | | 35526.4, AD-35538.4, AD-35544.4, AD-35561.4, AD- |
| | | | | 35567.4 |
| UCCUACAGGAAG | 2094 | CUUCCUGUAGGA | 2095 | AD-35555.4, AD-35532.4, AD-35526.4, AD- |
| | | | | 35550.4, AD-35538.4, AD-35544.4, AD-35561.4, AD- |
| | | | | 35567.4 |
| CCUACAGGAAGC | 2096 | GCUUCCUGUAGG | 2097 | AD-35556.4, AD-35532.4, AD-35526.4, AD- |
| | | | | 35550.4, AD-35538.4, AD-35544.4, AD-35561.4, AD- |
| | | | | 35567.4 |
| CUACAGGAAGCA | 2098 | UGCUUCCUGUAG | 2099 | AD-35562.4, AD-35556.4, AD-35532.4, AD- |
| | | | | 35526.4, AD-35550.4, AD-35538.4, AD-35544.4, AD- |
| | | | | 35567.4 |
| UACAGGAAGCAA | 2100 | UUGCUUCCUGUA | 2101 | AD-35562.4, AD-35556.4, AD-35532.4, AD- |
| | | | | 35526.4, AD-35550.4, AD-35568.4, AD-35538.4, AD- |
| | | | | 35544.4 |
| ACAGGAAGCAAG | 2102 | CUUGCUUCCUGU | 2103 | AD-35562.4, AD-35556.4, AD-35532.4, AD- |
| | | | | 35550.4, AD-35568.4, AD-35538.4, AD-35544.4, AD- |
| | | | | 35527.4 |
| CAGGAAGCAAGU | 2104 | ACUUGCUUCCUG | 2105 | AD-35562.4, AD-35556.4, AD-35550.4, AD- |
| | | | | 35568.4, AD-35538.4, AD-35544.4, AD-35533.4, AD- |
| | | | | 35527.4 |
| AGGAAGCAAGUA | 2106 | UACUUGCUUCCU | 2107 | AD-35562.4, AD-35556.4, AD-35550.4, AD- |
| | | | | 39776.1, AD-35568.4, AD-35544.4, AD-35533.4, AD- |
| | | | | 35527.4 |
| GGAAGCAAGUAG | 2108 | CUACUUGCUUCC | 2109 | AD-35562.4, AD-39735.1, AD-35556.4, AD- |
| | | | | 35550.4, AD-39776.1, AD-35568.4, AD-35533.4, AD- |
| | | | | 35527.4 |
| GAAGCAAGUAGU | 2110 | ACUACUUGCUUC | 2111 | AD-35562.4, AD-39735.1, AD-35556.4, AD- |
| | | | | 39776.1, AD-35568.4, AD-35533.4, AD-35527.4, AD- |
| | | | | 39741.1 |
| AAGCAAGUAGUA | 2112 | UACUACUUGCUU | 2113 | AD-35562.4, AD-39735.1, AD-39776.1, AD- |
| | | | | 35568.4, AD-39747.1, AD-35533.4, AD-35527.4, AD- |
| | | | | 39741.1 |
| AGCAAGUACUAA | 2114 | UUACUACUUGCU | 2115 | AD-39735.1, AD-39753.1, AD-39776.1, AD- |
| | | | | 35568.4, AD-39747.1, AD-35533.4, AD-35527.4, AD- |
| | | | | 39741.1 |
| GCAAGUAGUAAU | 2116 | AUUACUACUUGC | 2117 | AD-39735.1, AD-39759.1, AD-39753.1, AD- |
| | | | | 39776.1, AD-39747.1, AD-35533.4, AD-35527.4, AD- |
| | | | | 39741.1 |
| CAAGUAGUAAUU | 2118 | AAUUACUACUUG | 2119 | AD-39735.1, AD-39759.1, AD-39753.1, AD- |
| | | | | 39776.1, AD-39747.1, AD-35533.4, AD-39765.1, AD- |
| | | | | 39741.1 |
| AAGUAGUAAUUG | 2120 | CAAUUACUACUU | 2121 | AD-39735.1, AD-39771.1, AD-39759.1, AD- |
| | | | | 39753.1, AD-39776.1, AD-39747.1, AD-39765.1, AD- |
| | | | | 39741.1 |
| AGUAGUAAUUGA | 2122 | UCAAUUACUACU | 2123 | AD-39735.1, AD-39778.1, AD-39771.1, AD- |
| | | | | 39759.1, AD-39753.1, AD-39747.1, AD-39765.1, AD- |
| | | | | 39741.1 |
| GUAGUAAUUGAU | 2124 | AUCAAUUACUAC | 2125 | AD-39784.1, AD-39778.1, AD-39771.1, AD- |
| | | | | 39759.1, AD-39753.1, AD-39747.1, AD-39765.1, AD- |
| | | | | 39741.1 |
| UAGUAAUUGAUG | 2126 | CAUCAAUUACUA | 2127 | AD-39784.1, AD-39778.1, AD-39771.1, AD- |
| | | | | 39759.1, AD-39753.1, AD-39747.1, AD-39765.1, AD- |
| | | | | 39790.1 |
| AGUAAUUGAUGG | 2128 | CCAUCAAUUACU | 2129 | AD-39784.1, AD-39778.1, AD-39771.1, AD- |
| | | | | 39759.1, AD-39753.1, AD-39796.1, AD-39765.1, AD- |
| | | | | 39790.1 |
| GUAAUUGAUGGA | 2130 | UCCAUCAAUUAC | 2131 | AD-39784.1, AD-39778.1, AD-39771.1, AD- |
| | | | | 39759.1, AD-39796.1, AD-39765.1, AD-39802.1, AD- |
| | | | | 39790.1 |
| UAAUUGAUGGAG | 2132 | CUCCAUCAAUUA | 2133 | AD-39784.1, AD-39778.1, AD-39808.1, AD- |
| | | | | 39771.1, AD-39796.1, AD-39765.1, AD-39802.1, AD- |
| | | | | 39790.1 |
| AAUUGAUGGAGA | 2134 | UCUCCAUCAAUU | 2135 | AD-39784.1, AD-39814.1, AD-39778.1, AD- |
| | | | | 39808.1, AD-39771.1, AD-39796.1, AD-39802.1, AD- |
| | | | | 39790.1 |
| AUUGAUGGAGAA | 2136 | UUCUCCAUCAAU | 2137 | AD-39784.1, AD-39814.1, AD-39778.1, AD- |
| | | | | 39808.1, AD-39820.1, AD-39796.1, AD-39802.1, AD- |
| | | | | 39790.1 |
| UUGAUGGAGAAA | 2138 | UUUCUCCAUCAA | 2139 | AD-39784.1, AD-39814.1, AD-39808.1, AD- |
| | | | | 39820.1, AD-39779.1, AD-39796.1, AD-39802.1, AD- |
| | | | | 39790.1 |
| UGAUGGAGAAAC | 2140 | GUUUCUCCAUCA | 2141 | AD-39814.1, AD-39808.1, AD-39785.1, AD- |
| | | | | 39820.1, AD-39779.1, AD-39796.1, AD-39802.1, AD- |
| | | | | 39790.1 |
| GAUGGAGAAACC | 2142 | GGUUUCUCCAUC | 2143 | AD-39791.1, AD-39814.1, AD-39808.1, AD- |
| | | | | 39785.1, AD-39820.1, AD-39779.1, AD-39796.1, AD- |
| | | | | 39802.1 |
| AUGGAGAAACCU | 2144 | AGGUUUCUCCAU | 2145 | AD-39791.1, AD-39814.1, AD-39808.1, AD- |
| | | | | 39785.1, AD-39820.1, AD-39779.1, AD-39797.1, AD- |
| | | | | 39802.1 |
| UGGAGAAACCUG | 2146 | CAGGUUUCUCCA | 2147 | AD-39791.1, AD-39814.1, AD-39808.1, AD- |
| | | | | 39803.1, AD-39785.1, AD-39820.1, AD-39779.1, AD- |
| | | | | 39797.1 |
| GGAGAAACCUGU | 2148 | ACAGGUUUCUCC | 2149 | AD-39791.1, AD-39814.1, AD-39803.1, AD- |
| | | | | 39785.1, AD-39820.1, AD-39809.1, AD-39779.1, AD- |
| | | | | 39797.1 |
| GAGAAACCUGUC | 2150 | GACAGGUUUCUC | 2151 | AD-39815.1, AD-39791.1, AD-39803.1, AD- |
| | | | | 39785.1, AD-39820.1, AD-39809.1, AD-39779.1, AD- |
| | | | | 39797.1 |
| AGAAACCUGUCU | 2152 | AGACAGGUUUCU | 2153 | AD-39815.1, AD-39791.1, AD-39803.1, AD- |
| | | | | 39821.1, AD-39785.1, AD-39809.1, AD-39779.1, AD- |
| | | | | 39797.1 |
| GAAACCUGUCUC | 2154 | GAGACAGGUUUC | 2155 | AD-39815.1, AD-39791.1, AD-39803.1, AD- |
| | | | | 39821.1, AD-39785.1, AD-39809.1, AD-39780.1, AD- |
| | | | | 39797.1 |
| AAACCUGUCUCU | 2156 | AGAGACAGGUUU | 2157 | AD-39815.1, AD-39791.1, AD-39803.1, AD- |
| | | | | 39821.1, AD-39809.1, AD-39780.1, AD-39797.1, AD- |
| | | | | 39786.1 |
| AACCUGUCUCUU | 2158 | AAGAGACAGGUU | 2159 | AD-39815.1, AD-39803.1, AD-39821.1, AD- |
| | | | | 39809.1, AD-39792.1, AD-39780.1, AD-39797.1, AD- |
| | | | | 39786.1 |
| ACCUGUCUCUUG | 2160 | CAAGAGACAGGU | 2161 | AD-39815.1, AD-39803.1, AD-39821.1, AD- |
| | | | | 39809.1, AD-39792.1, AD-39780.1, AD-39798.1, AD- |
| | | | | 39786.1 |
| CCUGUCUCUUGG | 2162 | CCAAGAGACAGG | 2163 | AD-39815.1, AD-39821.1, AD-39809.1, AD- |
| | | | | 39792.1, AD-39804.1, AD-39780.1, AD-39798.1, AD- |
| | | | | 39786.1 |
| CUGUCUCUUGGA | 2164 | UCCAAGAGACAG | 2165 | AD-39815.1, AD-39821.1, AD-39792.1, AD- |
| | | | | 39804.1, AD-39810.1, AD-39780.1, AD-39798.1, AD- |
| | | | | 39786.1 |
| UGUCUCUUGGAU | 2166 | AUCCAAGAGACA | 2167 | AD-39816.1, AD-39821.1, AD-39792.1, AD- |
| | | | | 39804.1, AD-39810.1, AD-39780.1, AD-39798.1, AD- |
| | | | | 39786.1 |
| GUCUCUUGGAUA | 2168 | UAUCCAAGAGAC | 2169 | AD-39816.1, AD-39792.1, AD-39804.1, AD- |
| | | | | 39810.1, AD-39780.1, AD-39822.1, AD-39798.1, AD- |
| | | | | 39786.1 |
| UCUCUUGGAUAU | 2170 | AUAUCCAAGAGA | 2171 | AD-39816.1, AD-39792.1, AD-39804.1, AD- |
| | | | | 39810.1, AD-39781.1, AD-39822.1, AD-39798.1, AD- |
| | | | | 39786.1 |
| CUCUUGGAUAUU | 2172 | AAUAUCCAAGAG | 2173 | AD-39816.1, AD-39792.1, AD-39804.1, AD- |
| | | | | 39787.1, AD-39810.1, AD-39781.1, AD-39822.1, AD- |
| | | | | 39798.1 |
| UCUUGGAUAUUC | 2174 | GAAUAUCCAAGA | 2175 | AD-39816.1, AD-39793.1, AD-39804.1, AD- |
| | | | | 39787.1, AD-39810.1, AD-39781.1, AD-39822.1, AD- |
| | | | | 39798.1 |
| CUUGGAUAUUCU | 2176 | AGAAUAUCCAAG | 2177 | AD-39799.1, AD-39816.1, AD-39793.1, AD- |
| | | | | 39804.1, AD-39787.1, AD-39810.1, AD-39781.1, AD- |
| | | | | 39822.1 |
| UUGGAUAUUCUC | 2178 | GAGAAUAUCCAA | 2179 | AD-39799.1, AD-39816.1, AD-39793.1, AD- |
| | | | | 39787.1, AD-35539.4, AD-39810.1, AD-39781.1, AD- |
| | | | | 39822.1 |
| UGGAUAUUCUCG | 2180 | CGAGAAUAUCCA | 2181 | AD-39799.1, AD-39816.1, AD-39793.1, AD- |
| | | | | 39787.1, AD-35539.4, AD-35545.4, AD-39781.1, AD- |
| | | | | 39822.1 |
| GGAUAUUCUCGA | 2182 | UCGAGAAUAUCC | 2183 | AD-39799.1, AD-35551.4, AD-39793.1, AD- |
| | | | | 39787.1, AD-35539.4, AD-35545.4, AD-39781.1, AD- |
| | | | | 39822.1 |
| GAUAUUCUCGAC | 2184 | GUCGAGAAUAUC | 2185 | AD-39799.1, AD-35551.4, AD-39793.1, AD- |
| | | | | 35557.1, AD-39787.1, AD-35539.4, AD-35545.4, AD- |
| | | | | 39781.1 |
| AUAUUCUCGACA | 2186 | UGUCGAGAAUAU | 2187 | AD-39799.1, AD-35551.4, AD-39793.1, AD- |
| | | | | 35557.1, AD-39787.1, AD-35539.4, AD-35545.4, AD- |
| | | | | 35563.4 |
| UAUUCUCGACAc | 2188 | GUGUCGAGAAUA | 2189 | AD-39799.1, AD-35551.4, AD-39793.1, AD- |
| | | | | 35557.1, AD-35539.4, AD-35545.4, AD-35569.1, AD- |
| | | | | 35563.4 |
| AUUCUCGACACA | 2190 | UGUGUCGAGAAU | 2191 | AD-39799.1, AD-35528.4, AD-35551.4, AD- |
| | | | | 35557.1, AD-35539.4, AD-35545.4, AD-35569.1, AD- |
| | | | | 35563.4 |
| UUCUCGACACAG | 2192 | CUGUGUCGAGAA | 2193 | AD-35528.4, AD-35551.4, AD-35557.1, AD- |
| | | | | 35539.4, AD-35534.1, AD-35545.4, AD-35569.1, AD- |
| | | | | 35563.4 |
| UCUCGACACAGC | 2194 | GCUGUGUCGAGA | 2195 | AD-35528.4, AD-35551.4, AD-35557.1, AD- |
| | | | | 35540.4, AD-35534.1, AD-35545.4, AD-35569.1, AD- |
| | | | | 35563.4 |
| CUCGACACAGCA | 2196 | UGCUGUGUCGAG | 2197 | AD-35528.4, AD-35551.4, AD-35546.4, AD- |
| | | | | 35557.1, AD-35540.4, AD-35534.1, AD-35569.1, AD- |
| | | | | 35563.4 |
| UCGACACAGCAG | 2198 | CUGCUGUGUCGA | 2199 | AD-35552.4, AD-35528.4, AD-35546.4, AD- |
| | | | | 35557.1, AD-35540.4, AD-35534.1, AD-35569.1, AD- |
| | | | | 35563.4 |
| CGACACAGCAGG | 2200 | CCUGCUGUGUCG | 2201 | AD-35552.4, AD-35528.4, AD-35558.4, AD- |
| | | | | 35546.4, AD-35540.4, AD-35534.1, AD-35569.1, AD- |
| | | | | 35563.4 |
| GACACAGCAGGU | 2202 | ACCUGCUGUGUC | 2203 | AD-35552.4, AD-35528.4, AD-35558.4, AD- |
| | | | | 35546.4, AD-35540.4, AD-35534.1, AD-35564.4, AD- |
| | | | | 35569.1 |
| ACACAGCAGGUC | 2204 | GACCUGCUGUGU | 2205 | AD-35552.4, AD-35528.4, AD-35558.4, AD- |
| | | | | 35546.4, AD-35540.4, AD-35570.4, AD-35534.1, AD- |
| | | | | 35564.4 |
| CACAGCAGGUCA | 2206 | UGACCUGCUGUG | 2207 | AD-35552.4, AD-35558.4, AD-35546.4, AD- |
| | | | | 35540.4, AD-35570.4, AD-35534.1, AD-35564.4, AD- |
| | | | | 35571.4 |
| ACAGCAGGUCAA | 2208 | UUGACCUGCUGU | 2209 | AD-35577.4, AD-35552.4, AD-35558.4, AD- |
| | | | | 35546.4, AD-35540.4, AD-35570.4, AD-35564.4, AD- |
| | | | | 35571.4 |
| CAGCAGGUCAAG | 2210 | CUUGACCUGCUG | 2211 | AD-35577.4, AD-35552.4, AD-35558.4, AD- |
| | | | | 35546.4, AD-35583.4, AD-35570.4, AD-35564.4, AD- |
| | | | | 35571.4 |
| AGCAGGUCAAGA | 2212 | UCUUGACCUGCU | 2213 | AD-35577.4, AD-35552.4, AD-35558.4, AD- |
| | | | | 35583.4, AD-35570.4, AD-35564.4, AD-35589.4, AD- |
| | | | | 35571.4 |
| GCAGGUCAAGAG | 2214 | CUCUUGACCUGC | 2215 | AD-35577.4, AD-35595.4, AD-35558.4, AD- |
| | | | | 35583.4, AD-35570.4, AD-35564.4, AD-35589.4, AD- |
| | | | | 35571.4 |
| CAGGUCAAGAGG | 2216 | CCUCUUGACCUG | 2217 | AD-35577.4, AD-35595.4, AD-35583.4, AD- |
| | | | | 35570.4, AD-35564.4, AD-35589.4, AD-35571.4, AD- |
| | | | | 35601.4 |
| AGGUCAAGAGGA | 2218 | UCCUCUUGACCU | 2219 | AD-35577.4, AD-35595.4, AD-35583.4, AD- |
| | | | | 35570.4, AD-35589.4, AD-35607.4, AD-35571.4, AD- |
| | | | | 35601.4 |
| GGUCAAGAGGAG | 2220 | CUCCUCUUGACC | 2221 | AD-35577.4, AD-35595.4, AD-35583.4, AD- |
| | | | | 35589.4, AD-35607.4, AD-35571.4, AD-35613.4, AD- |
| | | | | 35601.4 |
| GUCAAGAGGAGU | 2222 | ACUCCUCUUGAC | 2223 | AD-35577.4, AD-35595.4, AD-35583.4, AD- |
| | | | | 35572.4, AD-35589.4, AD-35607.4, AD-35613.4, AD- |
| | | | | 35601.4 |
| UCAAGAGGAGUA | 2224 | UACUCCUCUUGA | 2225 | AD-35595.4, AD-35583.4, AD-35578.4, AD- |
| | | | | 35572.4, AD-35589.4, AD-35607.4, AD-35613.4, AD- |
| | | | | 35601.4 |
| CAAGAGGAGUAC | 2226 | GUACUCCUCUUG | 2227 | AD-35595.4, AD-35578.4, AD-35572.4, AD- |
| | | | | 35584.4, AD-35589.4, AD-35607.4, AD-35613.4, AD- |
| | | | | 35601.4 |
| AAGAGGAGUACA | 2228 | UGUACUCCUCUU | 2229 | AD-35590.4, AD-35595.4, AD-35578.4, AD- |
| | | | | 35572.4, AD-35584.4, AD-35607.4, AD-35613.4, AD- |
| | | | | 35601.4 |
| AGAGGAGUACAG | 2230 | CUGUACUCCUCU | 2231 | AD-35596.4, AD-35590.4, AD-35578.4, AD- |
| | | | | 35572.4, AD-35584.4, AD-35607.4, AD-35613.4, AD- |
| | | | | 35601.4 |
| GAGGAGUACAGU | 2232 | ACUGUACUCCUC | 2233 | AD-35596.4, AD-35590.4, AD-35578.4, AD- |
| | | | | 35572.4, AD-35602.4, AD-35584.4, AD-35607.4, AD- |
| | | | | 35613.4 |
| AGGAGUACAGUG | 2234 | CACUGUACUCCU | 2235 | AD-35608.4, AD-35596.4, AD-35590.4, AD- |
| | | | | 35578.4, AD-35572.4, AD-35602.4, AD-35584.4, AD- |
| | | | | 35613.4 |
| GGAGUACAGUGC | 2236 | GCACUGUACUCC | 2237 | AD-35608.4, AD-35596.4, AD-35590.4, AD- |
| | | | | 35578.4, AD-35572.4, AD-35614.4, AD-35602.4, AD- |
| | | | | 35584.4 |
| GAGUACAGUGCA | 2238 | UGCACUGUACUC | 2239 | AD-35608.4, AD-35596.4, AD-35590.4, AD- |
| | | | | 35578.4, AD-35614.4, AD-35602.4, AD-35584.4, AD- |
| | | | | 35573.4 |
| AGUACAGUGGAA | 2240 | UUGCACUGUACU | 2241 | AD-39805.1, AD-35608.4, AD-35596.4, AD- |
| | | | | 35590.4, AD-35614.4, AD-35602.4, AD-35584.4, AD- |
| | | | | 35573.4 |
| GUACAGUGCAAU | 2242 | AUUGCACUGUAC | 2243 | AD-39805.1, AD-35608.4, AD-35596.4, AD- |
| | | | | 35590.4, AD-39811.1, AD-35614.4, AD-35602.4, AD- |
| | | | | 35573.4 |
| UACAGUGCAAUG | 2244 | CAUUGCACUGUA | 2245 | AD-39805.1, AD-35608.4, AD-35596.4, AD- |
| | | | | 39817.1, AD-39811.1, AD-35614.4, AD-35602.4, AD- |
| | | | | 35573.4 |
| ACAGUGCAAUGA | 2246 | UCAUUGCACUGU | 2247 | AD-39805.1, AD-35608.4, AD-39823.1, AD- |
| | | | | 39817.1, AD-39811.1, AD-35614.4, AD-35602.4, AD- |
| | | | | 35573.4 |
| CAGUGCAAUGAG | 2248 | CUCAUUGCACUG | 2249 | AD-39805.1, AD-35608.4, AD-39823.1, AD- |
| | | | | 39817.1, AD-39811.1, AD-35614.4, AD-35573.4, AD- |
| | | | | 39782.1 |
| AGUGCAAUGAGG | 2250 | CCUCAUUGCACU | 2251 | AD-39805.1, AD-39823.1, AD-39817.1, AD- |
| | | | | 39788.1, AD-39811.1, AD-35614.4, AD-35573.4, AD- |
| | | | | 39782.1 |
| GUGCAAUGAGGG | 2252 | CCCUCAUUGCAC | 2253 | AD-39805.1, AD-39823.1, AD-39817.1, AD- |
| | | | | 39788.1, AD-39811.1, AD-35573.4, AD-39782.1, AD- |
| | | | | 39794.1 |
| UGCAAUGAGGGA | 2254 | UCCCUCAUUGCA | 2255 | AD-39805.1, AD-39823.1, AD-39817.1, AD- |
| | | | | 39788.1, AD-39811.1, AD-39782.1, AD-39794.1, AD- |
| | | | | 39800.1 |
| GCAAUGAGGGAC | 2256 | GUCCCUCAUUGC | 2257 | AD-39806.1, AD-39823.1, AD-39817.1, AD- |
| | | | | 39788.1, AD-39811.1, AD-39782.1, AD-39794.1, AD- |
| | | | | 39800.1 |
| CAAUGAGGGACC | 2258 | GGUCCCUCAUUG | 2259 | AD-39806.1, AD-39823.1, AD-39812.1, AD- |
| | | | | 39817.1, AD-39788.1, AD-39782.1, AD-39794.1, AD- |
| | | | | 39800.1 |
| AAUGAGGGACCA | 2260 | UGGUCCCUCAUU | 2261 | AD-39806.1, AD-39823.1, AD-39812.1, AD- |
| | | | | 39788.1, AD-39782.1, AD-39794.1, AD-39818.1, AD- |
| | | | | 39800.1 |
| AUGAGGGACCAG | 2262 | CUGGUCCCUCAU | 2263 | AD-39806.1, AD-39812.1, AD-39788.1, AD- |
| | | | | 39824.1, AD-39782.1, AD-39794.1, AD-39818.1, AD- |
| | | | | 39800.1 |
| UGAGGGACCAGU | 2264 | ACUGGUCCCUCA | 2265 | AD-39806.1, AD-39812.1, AD-39788.1, AD- |
| | | | | 39824.1, AD-39783.1, AD-39794.1, AD-39818.1, AD- |
| | | | | 39800.1 |
| GAGGGACCAGUA | 2266 | UACUGGUCCCUC | 2267 | AD-39789.1, AD-39806.1, AD-39812.1, AD- |
| | | | | 39824.1, AD-39783.1, AD-39794.1, AD-39818.1, AD- |
| | | | | 39800.1 |
| AGGGACCAGUAC | 2268 | GUACUGGUCCCU | 2269 | AD-39789.1, AD-39806.1, AD-39812.1, AD- |
| | | | | 39824.1, AD-39795.1, AD-39783.1, AD-39818.1, AD- |
| | | | | 39800.1 |
| GGGACCAGUACA | 2270 | UGUACUGGUCCC | 2271 | AD-39789.1, AD-39806.1, AD-39812.1, AD- |
| | | | | 39824.1, AD-39795.1, AD-39783.1, AD-39801.1, AD- |
| | | | | 39818.1 |
| GGACCAGUACAU | 2272 | AUGUACUGGUCC | 2273 | AD-39789.1, AD-39807.1, AD-39812.1, AD- |
| | | | | 39824.1, AD-39795.1, AD-39783.1, AD-39801.1, AD- |
| | | | | 39818.1 |
| GACCAGUACAUG | 2274 | CAUGUACUGGUC | 2275 | AD-39789.1, AD-39807.1, AD-39824.1, AD- |
| | | | | 39795.1, AD-39783.1, AD-39801.1, AD-39813.1, AD- |
| | | | | 39818.1 |
| ACCAGUACAUGA | 2276 | UCAUGUACUGGU | 2277 | AD-39789.1, AD-39807.1, AD-39824.1, AD- |
| | | | | 39795.1, AD-39783.1, AD-39801.1, AD-39813.1, AD- |
| | | | | 39819.1 |
| CCAGUACAUGAG | 2278 | CUCAUGUACUGG | 2279 | AD-39789.1, AD-39807.1, AD-39795.1, AD- |
| | | | | 39783.1, AD-39801.1, AD-39813.1, AD-39825.1, AD- |
| | | | | 39819.1 |
| CAGUACAUGAGG | 2280 | CCUCAUGUACUG | 2281 | AD-39789.1, AD-39807.1, AD-39795.1, AD- |
| | | | | 39801.1, AD-39813.1, AD-39825.1, AD-39831.1, AD- |
| | | | | 39819.1 |
| AGUACAUGAGGA | 2282 | UCCUCAUGUACU | 2283 | AD-39807.1, AD-39837.1, AD-39795.1, AD- |
| | | | | 39801.1, AD-39813.1, AD-39825.1, AD-39831.1, AD- |
| | | | | 39819.1 |
| GUACAUGAGGAC | 2284 | GUCCUCAUGUAC | 2285 | AD-39807.1, AD-39837.1, AD-39843.1, AD- |
| | | | | 39801.1, AD-39813.1, AD-39825.1, AD-39831.1, AD- |
| | | | | 39819.1 |
| UACAUGAGGACU | 2286 | AGUCCUCAUGUA | 2287 | AD-39807.1, AD-39837.1, AD-39843.1, AD- |
| | | | | 39813.1, AD-39825.1, AD-39831.1, AD-39849.1, AD- |
| | | | | 39819.1 |
| ACAUGAGGACUG | 2288 | CAGUCCUCAUGU | 2289 | AD-39837.1, AD-39843.1, AD-39813.1, AD- |
| | | | | 39825.1, AD-39855.1, AD-39831.1, AD-39849.1, AD- |
| | | | | 39819.1 |
| CAUGAGGACUGG | 2290 | CCAGUCCUCAUG | 2291 | AD-39861.1, AD-39837.1, AD-39843.1, AD- |
| | | | | 39825.1, AD-39855.1, AD-39831.1, AD-39849.1, AD- |
| | | | | 39819.1 |
| AUGAGGACUGGG | 2292 | CCCAGUCCUCAU | 2293 | AD-39861.1, AD-39837.1, AD-39843.1, AD- |
| | | | | 39825.1, AD-39855.1, AD-39831.1, AD-39867.1, AD- |
| | | | | 39849.1 |
| UGAGGACUGGGG | 2294 | CCCCAGUCCUCA | 2295 | AD-39861.1, AD-39837.1, AD-39843.1, AD- |
| | | | | 39826.1, AD-39855.1, AD-39831.1, AD-39867.1, AD- |
| | | | | 39849.1 |
| GAGGACUGGGGA | 2296 | UCCCCAGUCCUC | 2297 | AD-39861.1, AD-39832.1, AD-39837.1, AD- |
| | | | | 39843.1, AD-39826.1, AD-39855.1, AD-39867.1, AD- |
| | | | | 39849.1 |
| AGGACUGGGGAG | 2298 | CUCCCCAGUCCU | 2299 | AD-39861.1, AD-39832.1, AD-39843.1, AD- |
| | | | | 39826.1, AD-39855.1, AD-39867.1, AD-39849.1, AD- |
| | | | | 39838.1 |
| GGACUGGGGAGG | 2300 | CCUCCCCAGUCC | 2301 | AD-39844.1, AD-39861.1, AD-39832.1, AD- |
| | | | | 39826.1, AD-39855.1, AD-39867.1, AD-39849.1, AD- |
| | | | | 39838.1 |
| GACUGGGGAGGG | 2302 | CCCUCCCCAGUC | 2303 | AD-39850.1, AD-39844.1, AD-39861.1, AD- |
| | | | | 39832.1, AD-39826.1, AD-39855.1, AD-39867.1, AD- |
| | | | | 39838.1 |
| ACUGGGGAGGGC | 2304 | GCCCUCCCCAGU | 2305 | AD-39850.1, AD-39844.1, AD-39861.1, AD- |
| | | | | 39832.1, AD-39856.1, AD-39826.1, AD-39867.1, AD- |
| | | | | 39838.1 |
| CUGGGGAGGGCU | 2306 | AGCCCUCCCCAG | 2307 | AD-39850.1, AD-39844.1, AD-39862.1, AD- |
| | | | | 39832.1, AD-39856.1, AD-39826.1, AD-39867.1, AD- |
| | | | | 39838.1 |
| UGGGGAGGGCUU | 2308 | AAGCCCUCCCCA | 2309 | AD-39850.1, AD-39844.1, AD-39868.1, AD- |
| | | | | 39862.1, AD-39832.1, AD-39856.1, AD-39826.1, AD- |
| | | | | 39838.1 |
| GGGGAGGGCUUU | 2310 | AAAGCCCUCCCC | 2311 | AD-39850.1, AD-39844.1, AD-39868.1, AD- |
| | | | | 35579.4, AD-39862.1, AD-39832.1, AD-39856.1, AD- |
| | | | | 39838.1 |
| GGGAGGGCUUUC | 2312 | GAAAGCCCUCCC | 2313 | AD-35585.4, AD-39850.1, AD-39844.1, AD- |
| | | | | 39868.1, AD-35579.4, AD-39862.1, AD-39856.1, AD- |
| | | | | 39838.1 |
| GGAGGGCUUUCU | 2314 | AGAAAGCCCUCC | 2315 | AD-35585.4, AD-39850.1, AD-39844.1, AD- |
| | | | | 39868.1, AD-35579.4, AD-39862.1, AD-39856.1, AD- |
| | | | | 35591.4 |
| GAGGGCUUUCUU | 2316 | AAGAAAGCCCUC | 2317 | AD-35585.4, AD-39850.1, AD-39868.1, AD- |
| | | | | 35579.4, AD-39862.1, AD-35597.4, AD-39856.1, AD- |
| | | | | 35591.4 |
| AGGGCUUUCUUU | 2318 | AAAGAAAGCCCU | 2319 | AD-35585.4, AD-39868.1, AD-35579.4, AD- |
| | | | | 39862.1, AD-35597.4, AD-39856.1, AD-35591.4, AD- |
| | | | | 35603.4 |
| GGGCUUUCUUUG | 2320 | CAAAGAAAGCCC | 2321 | AD-35585.4, AD-39868.1, AD-35579.4, AD- |
| | | | | 39862.1, AD-35597.4, AD-35609.4, AD-35591.4, AD- |
| | | | | 35603.4 |
| GGCUUUCUUUGU | 2322 | ACAAAGAAAGCC | 2323 | AD-35585.4, AD-39868.1, AD-35579.4, AD- |
| | | | | 35615.4, AD-35597.4, AD-35609.4, AD-35591.4, AD- |
| | | | | 35603.4 |
| GCUUUCUUUGUG | 2324 | CACAAAGAAAGC | 2325 | AD-35585.4, AD-35579.4, AD-35615.4, AD- |
| | | | | 35597.4, AD-35609.4, AD-35591.4, AD-35603.4, AD- |
| | | | | 35574.4 |
| CUUUCUUUGUGU | 2326 | ACACAAAGAAAG | 2327 | AD-35585.4, AD-35615.4, AD-35597.4, AD- |
| | | | | 35609.4, AD-35591.4, AD-35603.4, AD-35580.1, AD- |
| | | | | 35574.4 |
| UUUCUUUGUGUA | 2328 | UACACAAAGAAA | 2329 | AD-35615.4, AD-35597.4, AD-35609.4, AD- |
| | | | | 35591.4, AD-35603.4, AD-35586.4, AD-35580.1, AD- |
| | | | | 35574.4 |
| UUCUUUGUGUAU | 2330 | AUACACAAAGAA | 2331 | AD-35615.4, AD-35597.4, AD-35609.4, AD- |
| | | | | 35592.4, AD-35603.4, AD-35586.4, AD-35580.1, AD- |
| | | | | 35574.4 |
| UCUUUGUGUAUU | 2332 | AAUACACAAAGA | 2333 | AD-35615.4, AD-35609.4, AD-35592.4, AD- |
| | | | | 35603.4, AD-35586.4, AD-35598.4, AD-35580.1, AD- |
| | | | | 35574.4 |
| CUUUGUGUAUUU | 2334 | AAAUACACAAAG | 2335 | AD-35604.4, AD-35615.4, AD-35609.4, AD- |
| | | | | 35592.4, AD-35586.4, AD-35598.4, AD-35580.1, AD- |
| | | | | 35574.4 |
| UUUGUGUAUUUG | 2336 | CAAAUACACAAA | 2337 | AD-35604.4, AD-35615.4, AD-35592.4, AD- |
| | | | | 35586.4, AD-35610.4, AD-35598.4, AD-35580.1, AD- |
| | | | | 35574.4 |
| UUGUGUAUUUGC | 2338 | GCAAAUACACAA | 2339 | AD-35604.4, AD-35592.4, AD-35586.4, AD- |
| | | | | 35610.4, AD-35598.4, AD-35616.4, AD-35580.1, AD- |
| | | | | 35574.4 |
| UGUGUAUUUGCC | 2340 | GGCAAAUACACA | 2341 | AD-35604.4, AD-35575.4, AD-35592.4, AD- |
| | | | | 35586.4, AD-35610.4, AD-35598.4, AD-35616.4, AD- |
| | | | | 35580.1 |
| GUGUAUUUGCCA | 2342 | UGGCAAAUACAC | 2343 | AD-35604.4, AD-35575.4, AD-35581.4, AD- |
| | | | | 35592.4, AD-35586.4, AD-35610.4, AD-35598.4, AD- |
| | | | | 35616.4 |
| UGUAUUUGCCAU | 2344 | AUGGCAAAUACA | 2345 | AD-35604.4, AD-35575.4, AD-35581.4, AD- |
| | | | | 35592.4, AD-35587.4, AD-35610.4, AD-35598.4, AD- |
| | | | | 35616.4 |
| GUAUUUGCCAUA | 2346 | UAUGGCAAAUAC | 2347 | AD-35604.4, AD-35575.4, AD-35581.4, AD- |
| | | | | 35587.4, AD-35610.4, AD-35598.4, AD-35616.4, AD- |
| | | | | 35593.4 |
| UAUUUGCCAUAA | 2348 | UUAUGGCAAAUA | 2349 | AD-35604.4, AD-35575.4, AD-35581.4, AD- |
| | | | | 35587.4, AD-35610.4, AD-35616.4, AD-35593.4, AD- |
| | | | | 35599.4 |
| AUUUGCCAUAAA | 2350 | UUUAUGGCAAAU | 2351 | AD-35575.4, AD-35581.4, AD-35587.4, AD- |
| | | | | 35610.4, AD-35605.4, AD-35616.4, AD-35593.4, AD- |
| | | | | 35599.4 |
| UUUGCCAUAAAU | 2352 | AUUUAUGGCAAA | 2353 | AD-35611.4, AD-35575.4, AD-35581.4, AD- |
| | | | | 35587.4, AD-35605.4, AD-35616.4, AD-35593.4, AD- |
| | | | | 35599.4 |
| UUGCCAUAAAUA | 2354 | UAUUUAUGGCAA | 2355 | AD-35611.4, AD-35575.4, AD-35581.4, AD- |
| | | | | 35587.4, AD-35605.4, AD-35593.4, AD-39827.1, AD- |
| | | | | 35599.4 |
| UGCCAUAAAUAA | 2356 | UUAUUUAUGGCA | 2357 | AD-35611.4, AD-35581.4, AD-35587.4, AD- |
| | | | | 39833.1, AD-35605.4, AD-35593.4, AD-39827.1, AD- |
| | | | | 35599.4 |
| GCCAUAAAUAAU | 2358 | AUUAUUUAUGGC | 2359 | AD-39839.1, AD-35611.4, AD-35587.4, AD- |
| | | | | 39833.1, AD-35605.4, AD-35593.4, AD-39827.1, AD- |
| | | | | 35599.4 |
| CCAUAAAUAAUA | 2360 | UAUUAUUUAUGG | 2361 | AD-39839.1, AD-35611.4, AD-39833.1, AD- |
| | | | | 35605.4, AD-35593.4, AD-39827.1, AD-35599.4, AD- |
| | | | | 39845.1 |
| CAUAAAUAAUAC | 2362 | GUAUUAUUUAUG | 2363 | AD-39839.1, AD-35611.4, AD-39833.1, AD- |
| | | | | 35605.4, AD-39851.1, AD-39827.1, AD-35599.4, AD- |
| | | | | 39845.1 |
| AUAAAUAAUACU | 2364 | AGUAUUAUUUAU | 2365 | AD-39839.1, AD-35611.4, AD-39857.1, AD- |
| | | | | 39833.1, AD-35605.4, AD-39851.1, AD-39827.1, AD- |
| | | | | 39845.1 |
| UAAAUAAUACUA | 2366 | UAGUAUUAUUUA | 2367 | AD-39839.1, AD-35611.4, AD-39857.1, AD- |
| | | | | 39833.1, AD-39851.1, AD-39863.1, AD-39827.1, AD- |
| | | | | 39845.1 |
| AAAUAAUACUAA | 2368 | UUAGUAUUAUUU | 2369 | AD-39839.1, AD-39857.1, AD-39869.1, AD- |
| | | | | 39833.1, AD-39851.1, AD-39863.1, AD-39827.1, AD- |
| | | | | 39845.1 |
| AAUAAUACUAAA | 2370 | UUUAGUAUUAUU | 2371 | AD-39828.1, AD-39839.1, AD-39857.1, AD- |
| | | | | 39869.1, AD-39833.1, AD-39851.1, AD-39863.1, AD- |
| | | | | 39845.1 |
| AUAAUACUAAAU | 2372 | AUUUAGUAUUAU | 2373 | AD-39828.1, AD-39839.1, AD-39857.1, AD- |
| | | | | 39834.1, AD-39869.1, AD-39851.1, AD-39863.1, AD- |
| | | | | 39845.1 |
| UAAUACUAAAUC | 2374 | GAUUUAGUAUUA | 2375 | AD-39828.1, AD-39857.1, AD-39834.1, AD- |
| | | | | 39869.1, AD-39840.1, AD-39851.1, AD-39863.1, AD- |
| | | | | 39845.1 |
| AAUACUAAAUCA | 2376 | UGAUUUAGUAUU | 2377 | AD-39828.1, AD-39857.1, AD-39834.1, AD- |
| | | | | 39869.1, AD-39840.1, AD-39851.1, AD-39863.1, AD- |
| | | | | 39846.1 |
| AUACUAAAUCAU | 2378 | AUGAUUUAGUAU | 2379 | AD-39828.1, AD-39852.1, AD-39857.1, AD- |
| | | | | 39834.1, AD-39869.1, AD-39840.1, AD-39863.1, AD- |
| | | | | 39846.1 |
| UACUAAAUCAUU | 2380 | AAUGAUUUAGUA | 2381 | AD-39828.1, AD-39852.1, AD-39834.1, AD- |
| | | | | 39858.1, AD-39869.1, AD-39840.1, AD-39863.1, AD- |
| | | | | 39846.1 |
| ACUAAAUCAUUU | 2382 | AAAUGAUUUAGU | 2383 | AD-39828.1, AD-39852.1, AD-39834.1, AD- |
| | | | | 39858.1, AD-39869.1, AD-39840.1, AD-39864.1, AD- |
| | | | | 39846.1 |
| CUAAAUCAUUUG | 2384 | CAAAUGAUUUAG | 2385 | AD-39828.1, AD-39852.1, AD-39870.1, AD- |
| | | | | 39834.1, AD-39858.1, AD-39840.1, AD-39864.1, AD- |
| | | | | 39846.1 |
| UAAAUCAUUUGA | 2386 | UCAAAUGAUUUA | 2387 | AD-39852.1, AD-39870.1, AD-39829.1, AD- |
| | | | | 39834.1, AD-39858.1, AD-39840.1, AD-39864.1, AD- |
| | | | | 39846.1 |
| AAAUCAUUUGAA | 2388 | UUCAAAUGAUUU | 2389 | AD-39852.1, AD-39870.1, AD-39829.1, AD- |
| | | | | 39858.1, AD-39840.1, AD-39835.1, AD-39864.1, AD- |
| | | | | 39846.1 |
| AAUCAUUUGAAG | 2390 | CUUCAAAUGAUU | 2391 | AD-39852.1, AD-39870.1, AD-39841.1, AD- |
| | | | | 39829.1, AD-39858.1, AD-39835.1, AD-39864.1, AD- |
| | | | | 39846.1 |
| AUCAUUUGAAGA | 2392 | UCUUCAAAUGAU | 2393 | AD-39852.1, AD-39870.1, AD-39841.1, AD- |
| | | | | 39829.1, AD-39858.1, AD-39835.1, AD-39864.1 |
| UCAUUUGAAGAU | 2394 | AUCUUCAAAUGA | 2395 | AD-39870.1, AD-39841.1, AD-39829.1, AD- |
| | | | | 39858.1, AD-39835.1, AD-39864.1, AD-39853.1 |
| CAUUUGAAGAUA | 2396 | Uaucuucaaaug | 2397 | AD-39870.1, AD-39841.1, AD-39829.1, AD- |
| | | | | 39835.1, AD-39859.1, AD-39864.1, AD-39853.1 |
| AUUUGAAGAUAU | 2398 | AUAUCUUCAAAU | 2399 | AD-39865.1, AD-39870.1, AD-39841.1, AD- |
| | | | | 39829.1, AD-39835.1, AD-39859.1, AD-39853.1 |
| UUUGAAGAUAUU | 2400 | AAUAUCUUCAAA | 2401 | AD-39871.1, AD-39865.1, AD-39841.1, AD- |
| | | | | 39829.1, AD-39835.1, AD-39859.1, AD-39853.1 |
| UUGAAGAUAUUC | 2402 | GAAUAUCUUCAA | 2403 | AD-39871.1, AD-39865.1, AD-39841.1, AD- |
| | | | | 39830.1, AD-39835.1, AD-39859.1, AD-39853.1 |
| UGAAGAUAUUCA | 2404 | UGAAUAUCUUCA | 2405 | AD-39871.1, AD-39865.1, AD-39841.1, AD- |
| | | | | 39830.1, AD-35617.4, AD-39859.1, AD-39853.1 |
| GAAGAUAUUCAC | 2406 | GUGAAUAUCUUC | 2407 | AD-39871.1, AD-39865.1, AD-39830.1, AD- |
| | | | | 35617.4, AD-35576.4, AD-39859.1, AD-39853.1 |
| AAGAUAUUCACC | 2408 | GGUGAAUAUCUU | 2409 | AD-35582.1, AD-39871.1, AD-39865.1, AD- |
| | | | | 39830.1, AD-35617.4, AD-35576.4, AD-39859.1, AD- |
| | | | | 39853.1 |
| AGAUAUUCACCA | 2410 | UGGUGAAUAUcu | 2411 | AD-35582.1, AD-39871.1, AD-39865.1, AD- |
| | | | | 39830.1, AD-35617.4, AD-35576.4, AD-39859.1, AD- |
| | | | | 35588.4 |
| GAUAUUCACCAU | 2412 | AUGGUGAAUAUC | 2413 | AD-35582.1, AD-39871.1, AD-39865.1, AD- |
| | | | | 35594.1, AD-39830.1, AD-35617.4, AD-35576.4, AD- |
| | | | | 35588.4 |
| AUAUUCACCAUU | 2414 | AAUGGUGAAUAU | 2415 | AD-35582.1, AD-39871.1, AD-35594.1, AD- |
| | | | | 35600.1, AD-39830.1, AD-35617.4, AD-35576.4, AD- |
| | | | | 35588.4 |
| UAUUCACCAUUA | 2416 | UAAUGGUGAAUA | 2417 | AD-35582.1, AD-35606.1, AD-35594.1, AD- |
| | | | | 35600.1, AD-39830.1, AD-35617.4, AD-35576.4, AD- |
| | | | | 35588.4 |
| AUUCACCAUUAU | 2418 | AUAAUGGUGAAU | 2419 | AD-35582.1, AD-35606.1, AD-35594.1, AD- |
| | | | | 35612.1, AD-35600.1, AD-35617.4, AD-35576.4, AD- |
| | | | | 35588.4 |
| UUCACCAUUAUA | 2420 | UAUAAUGGUGAA | 2421 | AD-35582.1, AD-35606.1, AD-35594.1, AD- |
| | | | | 35612.1, AD-35600.1, AD-35576.4, AD-35618.1, AD- |
| | | | | 35588.4 |
| UCACCAUUAUAG | 2422 | CUAUAAUGGUGA | 2423 | AD-35582.1, AD-35606.1, AD-35594.1, AD- |
| | | | | 35612.1, AD-35600.1, AD-35618.1, AD-35588.4, AD- |
| | | | | 38127.1 |
| CACCAUUAUAGA | 2424 | UCUAUAAUGGUG | 2425 | AD-38133.1, AD-35606.1, AD-35594.1, AD- |
| | | | | 35612.1, AD-35600.1, AD-35618.1, AD-35588.4, AD- |
| | | | | 38127.1 |
| ACCAUUAUAGAG | 2426 | CUCUAUAAUGGU | 2427 | AD-38133.1, AD-35606.1, AD-35594.1, AD- |
| | | | | 35612.1, AD-35600.1, AD-38139.1, AD-35618.1, AD- |
| | | | | 38127.1 |
| CCAUUAUAGAGA | 2428 | UCUCUAUAAUGG | 2429 | AD-38133.1, AD-35606.1, AD-35612.1, AD- |
| | | | | 35600.1, AD-38145.1, AD-38139.1, AD-35618.1, AD- |
| | | | | 38127.1 |
| CAUUAUAGAGAA | 2430 | UUCUCUAUAAUG | 2431 | AD-38133.1, AD-35606.1, AD-35612.1, AD- |
| | | | | 38145.1, AD-38139.1, AD-38151.1, AD-35618.1, AD- |
| | | | | 38127.1 |
| AUUAUAGAGAAC | 2432 | GUUCUCUAUAAU | 2433 | AD-38133.1, AD-35612.1, AD-38145.1, AD- |
| | | | | 38139.1, AD-38151.1, AD-38157.1, AD-35618.1, AD- |
| | | | | 38127.1 |
| UUAUAGAGAACA | 2434 | UGUUCUCUAUAA | 2435 | AD-38133.1, AD-38163.1, AD-38145.1, AD- |
| | | | | 38139.1, AD-38151.1, AD-38157.1, AD-35618.1, AD- |
| | | | | 38127.1 |
| UAUAGAGAACAA | 2436 | UUGUUCUCUAUA | 2437 | AD-38133.1, AD-38163.1, AD-38145.1, AD- |
| | | | | 38169.1, AD-38139.1, AD-38151.1, AD-38157.1, AD- |
| | | | | 38127.1 |
| AUAGAGAACAAA | 2438 | UUUGUUCUCUAU | 2439 | AD-38133.1, AD-38163.1, AD-38145.1, AD- |
| | | | | 38169.1, AD-38139.1, AD-38151.1, AD-38157.1, AD- |
| | | | | 38128.1 |
| UAGAGAACAAAU | 2440 | AUUUGUUCUCUA | 2441 | AD-38163.1, AD-38145.1, AD-38169.1, AD- |
| | | | | 38139.1, AD-38151.1, AD-38157.1, AD-38128.1, AD- |
| | | | | 38134.1 |
| AGAGAACAAAUU | 2442 | AAUUUGUUCUCU | 2443 | AD-38163.1, AD-38145.1, AD-38140.1, AD- |
| | | | | 38169.1, AD-38151.1, AD-38157.1, AD-38128.1, AD- |
| | | | | 38134.1 |
| GAGAACAAAUUA | 2444 | UAAUUUGUUCUC | 2445 | AD-38163.1, AD-38140.1, AD-38169.1, AD- |
| | | | | 38151.1, AD-38157.1, AD-38128.1, AD-39836.1, AD- |
| | | | | 38134.1 |
| AGAACAAAUUAA | 2446 | UUAAUUUGUUCU | 2447 | AD-38163.1, AD-38140.1, AD-38169.1, AD- |
| | | | | 38157.1, AD-38128.1, AD-39842.1, AD-39836.1, AD- |
| | | | | 38134.1 |
| GAACAAAUUAAA | 2448 | UUUAAUUUGUUC | 2449 | AD-38163.1, AD-38140.1, AD-38169.1, AD- |
| | | | | 38128.1, AD-39842.1, AD-39848.1, AD-39836.1, AD- |
| | | | | 38134.1 |
| AACAAAUUAAAA | 2450 | UUUUAAUUUGUU | 2451 | AD-38140.1, AD-38169.1, AD-39854.1, AD- |
| | | | | 38128.1, AD-39842.1, AD-39848.1, AD-39836.1, AD- |
| | | | | 38134.1 |
| ACAAAUUAAAAG | 2452 | CUUUUAAUUUGU | 2453 | AD-39860.1, AD-38140.1, AD-39854.1, AD- |
| | | | | 38128.1, AD-39842.1, AD-39848.1, AD-39836.1, AD- |
| | | | | 38134.1 |
| CAAAUUAAAAGA | 2454 | UCUUUUAAUUUG | 2455 | AD-39860.1, AD-38140.1, AD-39854.1, AD- |
| | | | | 39842.1, AD-39848.1, AD-39866.1, AD-39836.1, AD- |
| | | | | 38134.1 |
| AAAUUAAAAGAG | 2456 | CUCUUUUAAUUU | 2457 | AD-39992.1, AD-39860.1, AD-38140.1, AD- |
| | | | | 39854.1, AD-39842.1, AD-39848.1, AD-39866.1, AD- |
| | | | | 39836.1 |
| AAUUAAAAGAGU | 2458 | ACUCUUUUAAUU | 2459 | AD-39992.1, AD-39860.1, AD-39998.1, AD- |
| | | | | 39854.1, AD-39842.1, AD-39848.1, AD-39866.1, AD- |
| | | | | 39836.1 |
| AUUAAAAGAGUU | 2460 | AACUCUUUUAAU | 2461 | AD-39992.1, AD-39860.1, AD-40004.1, AD- |
| | | | | 39998.1, AD-39854.1, AD-39842.1, AD-39848.1, AD- |
| | | | | 39866.1 |
| UUAAAAGAGUUA | 2462 | UAACUCUUUUAA | 2463 | AD-39992.1, AD-39860.1, AD-40004.1, AD- |
| | | | | 39998.1, AD-39854.1, AD-40010.1, AD-39848.1, AD- |
| | | | | 39866.1 |
| UAAAAGAGUUAA | 2464 | UUAACUCUUUUA | 2465 | AD-40016.1, AD-39992.1, AD-39860.1, AD- |
| | | | | 40004.1, AD-39998.1, AD-39854.1, AD-40010.1, AD- |
| | | | | 39866.1 |
| AAAAGAGUUAAG | 2466 | CUUAACUCUUUU | 2467 | AD-40016.1, AD-39992.1, AD-39860.1, AD- |
| | | | | 40022.1, AD-40004.1, AD-39998.1, AD-40010.1, AD- |
| | | | | 39866.1 |
| AAAGAGUUAAGG | 2468 | CCUUAACUCUUU | 2469 | AD-40016.1, AD-40028.1, AD-39992.1, AD- |
| | | | | 40022.1, AD-40004.1, AD-39998.1, AD-40010.1, AD- |
| | | | | 39866.1 |
| AAGAGUUAAGGA | 2470 | UCCUUAACUCUU | 2471 | AD-40016.1, AD-40028.1, AD-40034.1, AD- |
| | | | | 39992.1, AD-40022.1, AD-40004.1, AD-39998.1, AD- |
| | | | | 40010.1 |
| AGAGUUAAGGAC | 2472 | GUCCUUAACUCU | 2473 | AD-40016.1, AD-40028.1, AD-40034.1, AD- |
| | | | | 40022.1, AD-40004.1, AD-39998.1, AD-40010.1 |
| GAGUUAAGGACU | 2474 | AGUCCUUAACUC | 2475 | AD-40016.1, AD-40028.1, AD-40034.1, AD- |
| | | | | 39999.1, AD-40022.1, AD-40004.1, AD-40010.1 |
| AGUUAAGGACUC | 2476 | GAGUCCUUAACU | 2477 | AD-40016.1, AD-40028.1, AD-40034.1, AD- |
| | | | | 39999.1, AD-40022.1, AD-40005.1, AD-40010.1 |
| GUUAAGGACUCU | 2478 | AGAGUCCUUAAC | 2479 | AD-40016.1, AD-40011.1, AD-40028.1, AD- |
| | | | | 40034.1, AD-39999.1, AD-40022.1, AD-40005.1 |
| UUAAGGACUCUG | 2480 | CAGAGUCCUUAA | 2481 | AD-40017.1, AD-40011.1, AD-40028.1, AD- |
| | | | | 40034.1, AD-39999.1, AD-40022.1, AD-40005.1 |
| UAAGGACUCUGA | 2482 | UCAGAGUCCUUA | 2483 | AD-40017.1, AD-40011.1, AD-40028.1, AD- |
| | | | | 40034.1, AD-39999.1, AD-40005.1 |
| AAGGACUCUGAA | 2484 | UUCAGAGUCCUU | 2485 | AD-40017.1, AD-40029.1, AD-40011.1, AD- |
| | | | | 40034.1, AD-39999.1, AD-40005.1 |
| AGGACUCUGAAG | 2486 | CUUCAGAGUCCU | 2487 | AD-40017.1, AD-40029.1, AD-40011.1, AD- |
| | | | | 39999.1, AD-40005.1, AD-40035.1 |
| GGACUCUGAAGA | 2488 | UCUUCAGAGUCC | 2489 | AD-40017.1, AD-40029.1, AD-40011.1, AD- |
| | | | | 39994.1, AD-39999.1, AD-40005.1, AD-40035.1 |
| GACUCUGAAGAU | 2490 | AUCUUCAGAGUC | 2491 | AD-40017.1, AD-40029.1, AD-40011.1, AD- |
| | | | | 40000.1, AD-39994.1, AD-40005.1, AD-40035.1 |
| ACUCUGAAGAUG | 2492 | CAUCUUCAGAGU | 2493 | AD-40017.1, AD-40029.1, AD-40011.1, AD- |
| | | | | 40000.1, AD-39994.1, AD-40006.1, AD-40035.1 |
| CUCUGAAGAUGU | 2494 | ACAUCUUCAGAG | 2495 | AD-40017.1, AD-40029.1, AD-40000.1, AD- |
| | | | | 39994.1, AD-40012.1, AD-40006.1, AD-40035.1 |
| UCUGAAGAUGUA | 2496 | UACAUCUUCAGA | 2497 | AD-40029.1, AD-40000.1, AD-39994.1, AD- |
| | | | | 40012.1, AD-40006.1, AD-40035.1, AD-40018.1 |
| CUGAAGAUGUAC | 2498 | GUACAUCUUCAG | 2499 | AD-40029.1, AD-40000.1, AD-39994.1, AD- |
| | | | | 40024.1, AD-40012.1, AD-40006.1, AD-40035.1, AD- |
| | | | | 40018.1 |
| UGAAGAUGUACC | 2500 | GGUACAUCUUCA | 2501 | AD-40030.1, AD-40000.1, AD-39994.1, AD- |
| | | | | 40024.1, AD-40012.1, AD-40006.1, AD-40035.1, AD- |
| | | | | 40018.1 |
| GAAGAUGUACCU | 2502 | AGGUACAUCUUC | 2503 | AD-40030.1, AD-40000.1, AD-39994.1, AD- |
| | | | | 40024.1, AD-40012.1, AD-40006.1, AD-38146.1, AD- |
| | | | | 40018.1 |
| AAGAUGUACCUA | 2504 | UAGGUACAUCUU | 2505 | AD-40030.1, AD-40000.1, AD-40024.1, AD- |
| | | | | 40012.1, AD-40006.1, AD-38146.1, AD-40018.1, AD- |
| | | | | 38152.1 |
| AGAUGUACCUAU | 2506 | AUAGGUACAUCU | 2507 | AD-40030.1, AD-40024.1, AD-40012.1, AD- |
| | | | | 40006.1, AD-38158.1, AD-38146.1, AD-40018.1, AD- |
| | | | | 38152.1 |
| GAUGUACCUAUG | 2508 | CAUAGGUACAUC | 2509 | AD-40030.1, AD-40024.1, AD-40012.1, AD- |
| | | | | 38164.1, AD-38158.1, AD-38146.1, AD-40018.1, AD- |
| | | | | 38152.1 |
| AUGUACCUAUGG | 2510 | CCAUAGGUACAU | 2511 | AD-40030.1, AD-40024.1, AD-38164.1, AD- |
| | | | | 38170.1, AD-38158.1, AD-38146.1, AD-40018.1, AD- |
| | | | | 38152.1 |
| UGUACCUAUGGU | 2512 | ACCAUAGGUACA | 2513 | AD-40030.1, AD-40024.1, AD-38164.1, AD- |
| | | | | 38129.1, AD-38170.1, AD-38158.1, AD-38146.1, AD- |
| | | | | 38152.1 |
| GUACCUAUGGUC | 2514 | GACCAUAGGUAC | 2515 | AD-40030.1, AD-38164.1, AD-38129.1, AD- |
| | | | | 38170.1, AD-38158.1, AD-38146.1, AD-38152.1, AD- |
| | | | | 38135.1 |
| UACCUAUGGUCC | 2516 | GGACCAUAGGUA | 2517 | AD-38164.1, AD-38129.1, AD-38170.1, AD- |
| | | | | 38158.1, AD-38146.1, AD-38141.1, AD-38152.1, AD- |
| | | | | 38135.1 |
| ACCUAUGGUCCU | 2518 | AGGACCAUAGGU | 2519 | AD-38164.1, AD-38129.1, AD-38170.1, AD- |
| | | | | 38147.1, AD-38158.1, AD-38141.1, AD-38152.1, AD- |
| | | | | 38135.1 |
| CCUAUGGUCCUA | 2520 | UAGGACCAUAGG | 2521 | AD-38164.1, AD-38129.1, AD-38153.1, AD- |
| | | | | 38170.1, AD-38147.1, AD-38158.1, AD-38141.1, AD- |
| | | | | 38135.1 |
| CUAUGGUCCUAG | 2522 | CUAGGACCAUAG | 2523 | AD-38164.1, AD-38159.1, AD-38129.1, AD- |
| | | | | 38153.1, AD-38170.1, AD-38147.1, AD-38141.1, AD- |
| | | | | 38135.1 |
| UAUGGUCCUAGU | 2524 | ACUAGGACCAUA | 2525 | AD-38165.1, AD-38159.1, AD-38129.1, AD- |
| | | | | 38153.1, AD-38170.1, AD-38147.1, AD-38141.1, AD- |
| | | | | 38135.1 |
| AUGGUCCUAGUA | 2526 | UACUAGGACCAU | 2527 | AD-38165.1, AD-38171.1, AD-38159.1, AD- |
| | | | | 38129.1, AD-38153.1, AD-38147.1, AD-38141.1, AD- |
| | | | | 38135.1 |
| UGGUCCUAGUAG | 2528 | CUACUAGGACCA | 2529 | AD-38165.1, AD-38171.1, AD-38159.1, AD- |
| | | | | 38153.1, AD-38147.1, AD-38141.1, AD-38130.1, AD- |
| | | | | 38135.1 |
| GGUCCUAGUAGG | 2530 | CCUACUAGGACC | 2531 | AD-38165.1, AD-38171.1, AD-38159.1, AD- |
| | | | | 38136.1, AD-38153.1, AD-38147.1, AD-38141.1, AD- |
| | | | | 38130.1 |
| GUCCUAGUAGGA | 2532 | UCCUACUAGGAC | 2533 | AD-38165.1, AD-38171.1, AD-38159.1, AD- |
| | | | | 38136.1, AD-38153.1, AD-38147.1, AD-38142.1, AD- |
| | | | | 38130.1 |
| UCCUAGUAGGAA | 2534 | UUCCUACUAGGA | 2535 | AD-38165.1, AD-38171.1, AD-38159.1, AD- |
| | | | | 38136.1, AD-38148.1, AD-38153.1, AD-38142.1, AD- |
| | | | | 38130.1 |
| CCUAGUAGGAAA | 2536 | UUUCCUACUAGG | 2537 | AD-38165.1, AD-38171.1, AD-38154.1, AD- |
| | | | | 38159.1, AD-38136.1, AD-38148.1, AD-38142.1, AD- |
| | | | | 38130.1 |
| CUAGUAGGAAAU | 2538 | AUUUCCUACUAG | 2539 | AD-38165.1, AD-38171.1, AD-38154.1, AD- |
| | | | | 38136.1, AD-38148.1, AD-38160.1, AD-38142.1, AD- |
| | | | | 38130.1 |
| UAGUAGGAAAUA | 2540 | UAUUUCCUACUA | 2541 | AD-38171.1, AD-38154.1, AD-38136.1, AD- |
| | | | | 38148.1, AD-38166.1, AD-38160.1, AD-38142.1, AD- |
| | | | | 38130.1 |
| AGUAGGAAAUAA | 2542 | UUAUUUCCUACU | 2543 | AD-38154.1, AD-38136.1, AD-38148.1, AD- |
| | | | | 38172.1, AD-38166.1, AD-38160.1, AD-38142.1, AD- |
| | | | | 38130.1 |
| GUAGGAAAUAAA | 2544 | UUUAUUUCCUAC | 2545 | AD-40036.1, AD-38154.1, AD-38136.1, AD- |
| | | | | 38148.1, AD-38172.1, AD-38166.1, AD-38160.1, AD- |
| | | | | 38142.1 |
| UAGGAAAUAAAU | 2546 | AUUUAUUUCCUA | 2547 | AD-39995.1, AD-40036.1, AD-38154.1, AD- |
| | | | | 38148.1, AD-38172.1, AD-38166.1, AD-38160.1, AD- |
| | | | | 38142.1 |
| AGGAAAUAAAUG | 2548 | CAUUUAUUUCCU | 2549 | AD-39995.1, AD-40036.1, AD-38154.1, AD- |
| | | | | 40001.1, AD-38148.1, AD-38172.1, AD-38166.1, AD- |
| | | | | 38160.1 |
| GGAAAUAAAUGU | 2550 | ACAUUUAUUUCC | 2551 | AD-39995.1, AD-40036.1, AD-38154.1, AD- |
| | | | | 40001.1, AD-38172.1, AD-38166.1, AD-38160.1, AD- |
| | | | | 40007.1 |
| GAAAUAAAUGUG | 2552 | CACAUUUAUUUC | 2553 | AD-39995.1, AD-40036.1, AD-40013.1, AD- |
| | | | | 40001.1, AD-38172.1, AD-38166.1, AD-38160.1, AD- |
| | | | | 40007.1 |
| AAAUAAAUGUGA | 2554 | UCACAUUUAUUU | 2555 | AD-39995.1, AD-40036.1, AD-40013.1, AD- |
| | | | | 40001.1, AD-38172.1, AD-38166.1, AD-40007.1, AD- |
| | | | | 40019.1 |
| AAUAAAUGUGAU | 2556 | AUCACAUUUAUU | 2557 | AD-39995.1, AD-40036.1, AD-40013.1, AD- |
| | | | | 40001.1, AD-40025.1, AD-38172.1, AD-40007.1, AD- |
| | | | | 40019.1 |
| AUAAAUGUGAUU | 2558 | AAUCACAUUUAU | 2559 | AD-39995.1, AD-40036.1, AD-40013.1, AD- |
| | | | | 40001.1, AD-40025.1, AD-40031.1, AD-40007.1, AD- |
| | | | | 40019.1 |
| UAAAUGUGAUUU | 2560 | AAAUCACAUUUA | 2561 | AD-39995.1, AD-40013.1, AD-40037.1, AD- |
| | | | | 40001.1, AD-40025.1, AD-40031.1, AD-40007.1, AD- |
| | | | | 40019.1 |
| AAAUGUGAUUUG | 2562 | CAAAUCACAUUU | 2563 | AD-40013.1, AD-40037.1, AD-40001.1, AD- |
| | | | | 40025.1, AD-40031.1, AD-40007.1, AD-39996.1, AD- |
| | | | | 40019.1 |
| AAUGUGAUUUGC | 2564 | GCAAAUCACAUU | 2565 | AD-40013.1, AD-40037.1, AD-40025.1, AD- |
| | | | | 40031.1, AD-40002.1, AD-40007.1, AD-39996.1, AD- |
| | | | | 40019.1 |
| AUGUGAUUUGCC | 2566 | GGCAAAUCACAU | 2567 | AD-40008.1, AD-40013.1, AD-40037.1, AD- |
| | | | | 40025.1, AD-40031.1, AD-40002.1, AD-39996.1, AD- |
| | | | | 40019.1 |
| UGUGAUUUGCCU | 2568 | AGGCAAAUCACA | 2569 | AD-40008.1, AD-40037.1, AD-40025.1, AD- |
| | | | | 40031.1, AD-40002.1, AD-40014.1, AD-39996.1, AD- |
| | | | | 40019.1 |
| GUGAUUUCCCUU | 2570 | AAGGCAAAUCAC | 2571 | AD-40008.1, AD-40037.1, AD-40020.1, AD- |
| | | | | 40025.1, AD-40031.1, AD-40002.1, AD-40014.1, AD- |
| | | | | 39996.1 |
| UGAUUUGCCUUC | 2572 | GAAGGCAAAUCA | 2573 | AD-40026.1, AD-40008.1, AD-40037.1, AD- |
| | | | | 40020.1, AD-40031.1, AD-40002.1, AD-40014.1, AD- |
| | | | | 39996.1 |
| GAUUUGCCUUCU | 2574 | AGAAGGCAAAUC | 2575 | AD-40026.1, AD-40008.1, AD-40032.1, AD- |
| | | | | 40037.1, AD-40020.1, AD-40002.1, AD-40014.1, AD- |
| | | | | 39996.1 |
| AUUUGCCUUCUA | 2576 | UAGAAGGCAAAU | 2577 | AD-40038.1, AD-40026.1, AD-40008.1, AD- |
| | | | | 40032.1, AD-40020.1, AD-40002.1, AD-40014.1, AD- |
| | | | | 39996.1 |
| UUUGCCUUCUAG | 2578 | CUAGAAGGCAAA | 2579 | AD-40038.1, AD-40026.1, AD-40008.1, AD- |
| | | | | 40032.1, AD-40020.1, AD-40002.1, AD-39997.1, AD- |
| | | | | 40014.1 |
| UUGCCUUCUAGA | 2580 | UCUAGAAGGCAA | 2581 | AD-40038.1, AD-40026.1, AD-40008.1, AD- |
| | | | | 40032.1, AD-40020.1, AD-39997.1, AD-40014.1 |
| UGCCUUCUAGAA | 2582 | UUCUAGAAGGCA | 2583 | AD-40038.1, AD-40026.1, AD-40032.1, AD- |
| | | | | 40020.1, AD-40009.1, AD-39997.1, AD-40014.1 |
| GCCUUCUAGAAC | 2584 | GUUCUAGAAGGC | 2585 | AD-40038.1, AD-40026.1, AD-40015.1, AD- |
| | | | | 40032.1, AD-40020.1, AD-40009.1, AD-39997.1 |
| CCUUCUAGAACA | 2586 | UGUUCUAGAAGG | 2587 | AD-40038.1, AD-40026.1, AD-40015.1, AD- |
| | | | | 40021.1, AD-40032.1, AD-40009.1, AD-39997.1 |
| CUUCUAGAACAG | 2588 | CUGUUCUAGAAG | 2589 | AD-40038.1, AD-40027.1, AD-40015.1, AD- |
| | | | | 40021.1, AD-40032.1, AD-40009.1, AD-39997.1 |
| UUCUAGAACAGU | 2590 | ACUGUUCUAGAA | 2591 | AD-40038.1, AD-40027.1, AD-40015.1, AD- |
| | | | | 40021.1, AD-40009.1, AD-40033.1, AD-39997.1 |
| UCUAGAACAGUA | 2592 | UACUGUUCUAGA | 2593 | 27.1, AD-40015.1, AD-40021.1, AD- |
| | | | | 400AD-400 39.1, AD-40009.1, AD-40033.1, AD-39997.1 |
| CUAGAACAGUAG | 2594 | CUACUGUUCUAG | 2595 | AD-40027.1, AD-40015.1, AD-40021.1, AD- |
| | | | | 40039.1, AD-40009.1, AD-40033.1, AD-40045.1 |
| UAGAACAGUAGA | 2596 | UCUACUGUUCUA | 2597 | AD-40027.1, AD-40015.1, AD-40021.1, AD- |
| | | | | 40051.1, AD-40039.1, AD-40009.1, AD-40033.1, AD- |
| | | | | 40045.1 |
| AGAACAGUAGAC | 2598 | GUCUACUGUUCU | 2599 | AD-40027.1, AD-40057.1, AD-40015.1, AD- |
| | | | | 40021.1, AD-40051.1, AD-40039.1, AD-40033.1, AD- |
| | | | | 40045.1 |
| GAACAGUAGACA | 2600 | UGUCUACUGUUC | 2601 | AD-40027.1, AD-40057.1, AD-40021.1, AD- |
| | | | | 40051.1, AD-40039.1, AD-40063.1, AD-40033.1, AD- |
| | | | | 40045.1 |
| AACAGUAGACAC | 2602 | GUGUCUACUGUU | 2603 | AD-40027.1, AD-40057.1, AD-40051.1, AD- |
| | | | | 40039.1, AD-40063.1, AD-40033.1, AD-40045.1, AD- |
| | | | | 40069.1 |
| ACAGUAGACACA | 2604 | UGUGUCUACUGU | 2605 | AD-40057.1, AD-40051.1, AD-40075.1, AD- |
| | | | | 40039.1, AD-40063.1, AD-40033.1, AD-40045.1, AD- |
| | | | | 40069.1 |
| CAGUAGACACAA | 2606 | UUGUGUCUACUG | 2607 | AD-40057.1, AD-40051.1, AD-40075.1, AD- |
| | | | | 40039.1, AD-40081.1, AD-40063.1, AD-40045.1, AD- |
| | | | | 40069.1 |
| AGUAGACACAAA | 2608 | UUUGUGUCUACU | 2609 | AD-40057.1, AD-40051.1, AD-40075.1, AD- |
| | | | | 40040.1, AD-40081.1, AD-40063.1, AD-40045.1, AD- |
| | | | | 40069.1 |
| GUAGACACAAAA | 2610 | UUUUGUGUCUAC | 2611 | AD-40057.1, AD-40051.1, AD-40075.1, AD- |
| | | | | 40046.1, AD-40040.1, AD-40081.1, AD-40063.1, AD- |
| | | | | 40069.1 |
| UAGACACAAAAC | 2612 | GUUUUGUGUCUA | 2613 | AD-40057.1, AD-40075.1, AD-40052.1, AD- |
| | | | | 40046.1, AD-40040.1, AD-40081.1, AD-40063.1, AD- |
| | | | | 40069.1 |
| AGACACAAAACA | 2614 | UGUUUUGUGUCU | 2615 | AD-40058.1, AD-40075.1, AD-40052.1, AD- |
| | | | | 40046.1, AD-40040.1, AD-40081.1, AD-40063.1, AD- |
| | | | | 40069.1 |
| GACACAAAACAG | 2616 | CUGUUUUGUGUC | 2617 | AD-40058.1, AD-40075.1, AD-40052.1, AD- |
| | | | | 40046.1, AD-40040.1, AD-40081.1, AD-40064.1, AD- |
| | | | | 40069.1 |
| ACACAAAACAGG | 2618 | CCUGUUUUGUGU | 2619 | AD-40070.1, AD-40058.1, AD-40075.1, AD- |
| | | | | 40052.1, AD-40046.1, AD-40040.1, AD-40081.1, AD- |
| | | | | 40064.1 |
| CACAAAACAGGC | 2620 | GCCUGUUUUGUG | 2621 | AD-40070.1, AD-40058.1, AD-40052.1, AD- |
| | | | | 40046.1, AD-40076.1, AD-40040.1, AD-40081.1, AD- |
| | | | | 40064.1 |
| ACAAAACAGGCU | 2622 | AGCCUGUUUUGU | 2623 | AD-40070.1, AD-40058.1, AD-40052.1, AD- |
| | | | | 40046.1, AD-40076.1, AD-40040.1, AD-40082.1, AD- |
| | | | | 40064.1 |
| CAAAACAGGCUC | 2624 | GAGCCUGUUUUG | 2625 | AD-40070.1, AD-40058.1, AD-40052.1, AD- |
| | | | | 40046.1, AD-40076.1, AD-40041.1, AD-40082.1, AD- |
| | | | | 40064.1 |
| AAAACAGGCUCA | 2626 | UGAGCCUGUUUU | 2627 | AD-40070.1, AD-40058.1, AD-40052.1, AD- |
| | | | | 40076.1, AD-40041.1, AD-40082.1, AD-40064.1, AD- |
| | | | | 40047.1 |
| AAACAGGCUCAG | 2628 | CUGAGCCUGUUU | 2629 | AD-40070.1, AD-40058.1, AD-40076.1, AD- |
| | | | | 40041.1, AD-40082.1, AD-40053.1, AD-40064.1, AD- |
| | | | | 40047.1 |
| AACAGGCUCAGG | 2630 | CCUGAGCCUGUU | 2631 | AD-40059.1, AD-40070.1, AD-40076.1, AD- |
| | | | | 40041.1, AD-40082.1, AD-40053.1, AD-40064.1, AD- |
| | | | | 40047.1 |
| ACAGGCUCAGGA | 2632 | UCCUGAGCCUGU | 2633 | AD-40059.1, AD-40070.1, AD-40065.1, AD- |
| | | | | 40076.1, AD-40041.1, AD-40082.1, AD-40053.1, AD- |
| | | | | 40047.1 |
| CAGGCUCAGGAC | 2634 | GUCCUGAGCCUG | 2635 | AD-40059.1, AD-40065.1, AD-40076.1, AD- |
| | | | | 40041.1, AD-40082.1, AD-40071.1, AD-40053.1, AD- |
| | | | | 40047.1 |
| AGGCUCAGGACU | 2636 | AGUCCUGAGCCU | 2637 | AD-40059.1, AD-40065.1, AD-40041.1, AD- |
| | | | | 40082.1, AD-40077.1, AD-40071.1, AD-40053.1, AD- |
| | | | | 40047.1 |
| GGCUCAGGACUU | 2638 | AAGUCCUGAGCC | 2639 | AD-40059.1, AD-40065.1, AD-40041.1, AD- |
| | | | | 40077.1, AD-40071.1, AD-40053.1, AD-40083.1, AD- |
| | | | | 40047.1 |
| GCUCAGGACUUA | 2640 | UAAGUCCUGAGC | 2641 | AD-40059.1, AD-40065.1, AD-40042.1, AD- |
| | | | | 40077.1, AD-40071.1, AD-40053.1, AD-40083.1, AD- |
| | | | | 40047.1 |
| CUCAGGACUUAG | 2642 | CUAAGUCCUGAG | 2643 | AD-40059.1, AD-40065.1, AD-40042.1, AD- |
| | | | | 40048.1, AD-40077.1, AD-40071.1, AD-40053.1, AD- |
| | | | | 40083.1 |
| UCAGGACUUAGC | 2644 | GCUAAGUCCUGA | 2645 | AD-40059.1, AD-40065.1, AD-40054.1, AD- |
| | | | | 40042.1, AD-40048.1, AD-40077.1, AD-40071.1, AD- |
| | | | | 40083.1 |
| CAGGACUUAGCA | 2646 | UGCUAAGUCCUG | 2647 | AD-40065.1, AD-40054.1, AD-40060.1, AD- |
| | | | | 40042.1, AD-40048.1, AD-40077.1, AD-40071.1, AD- |
| | | | | 40083.1 |
| AGGACUUAGGAA | 2648 | UUGCUAAGUCCU | 2649 | AD-40054.1, AD-40060.1, AD-40042.1, AD- |
| | | | | 40066.1, AD-40048.1, AD-40077.1, AD-40071.1, AD- |
| | | | | 40083.1 |
| GGACUUAGCAAG | 2650 | CUUGCUAAGUCC | 2651 | AD-40072.1, AD-40054.1, AD-40060.1, AD- |
| | | | | 40042.1, AD-40066.1, AD-40048.1, AD-40077.1, AD- |
| | | | | 40083.1 |
| GACUUAGCAAGA | 2652 | UCUUGCUAAGUC | 2653 | AD-40072.1, AD-40054.1, AD-40060.1, AD- |
| | | | | 40042.1, AD-40066.1, AD-40048.1, AD-40078.1, AD- |
| | | | | 40083.1 |
| ACUUAGCAAGAA | 2654 | UUCUUGCUAAGU | 2655 | AD-40072.1, AD-40054.1, AD-40060.1, AD- |
| | | | | 40042.1, AD-40066.1, AD-40048.1, AD-40084.1, AD- |
| | | | | 40078.1 |
| CUUAGCAAGAAG | 2656 | CUUCUUGCUAAG | 2657 | AD-40072.1, AD-40054.1, AD-40060.1, AD- |
| | | | | 40066.1, AD-40043.1, AD-40048.1, AD-40084.1, AD- |
| | | | | 40078.1 |
| UUAGCAAGAAGU | 2658 | ACUUCUUGCUAA | 2659 | AD-40072.1, AD-40054.1, AD-40060.1, AD- |
| | | | | 40066.1, AD-40043.1, AD-40084.1, AD-40049.1, AD- |
| | | | | 40078.1 |
| UAGCAAGAAGUU | 2660 | AACUUCUUGCUA | 2661 | AD-40072.1, AD-40060.1, AD-40066.1, AD- |
| | | | | 40055.1, AD-40043.1, AD-40084.1, AD-40049.1, AD- |
| | | | | 40078.1 |
| AGCAAGAAGUUA | 2662 | UAACUUCUUGCU | 2663 | AD-40072.1, AD-40066.1, AD-40055.1, AD- |
| | | | | 40043.1, AD-40061.1, AD-40084.1, AD-40049.1, AD- |
| | | | | 40078.1 |
| GCAAGAAGUUAU | 2664 | AUAACUUCUUGC | 2665 | AD-40072.1, AD-40055.1, AD-40067.1, AD- |
| | | | | 40043.1, AD-40061.1, AD-40084.1, AD-40049.1, AD- |
| | | | | 40078.1 |
| CAAGAAGUUAUG | 2666 | CAUAACUUCUUG | 2667 | AD-40055.1, AD-40067.1, AD-40043.1, AD- |
| | | | | 40061.1, AD-40084.1, AD-40073.1, AD-40049.1, AD- |
| | | | | 40078.1 |
| AAGAAGUUAUGG | 2668 | CCAUAACUUCUU | 2669 | AD-40055.1, AD-40067.1, AD-40043.1, AD- |
| | | | | 40061.1, AD-40084.1, AD-40073.1, AD-40079.1, AD- |
| | | | | 40049.1 |
| AGAAGUUAUGGA | 2670 | UCCAUAACUUCU | 2671 | AD-40085.1, AD-40055.1, AD-40067.1, AD- |
| | | | | 40043.1, AD-40061.1, AD-40073.1, AD-40079.1, AD- |
| | | | | 40049.1 |
| GAAGUUAUGGAA | 2672 | UUCCAUAACUUC | 2673 | AD-40085.1, AD-40044.1, AD-40055.1, AD- |
| | | | | 40067.1, AD-40061.1, AD-40073.1, AD-40079.1, AD- |
| | | | | 40049.1 |
| AAGUUAUGGAAU | 2674 | AUUCCAUAACUU | 2675 | AD-40085.1, AD-40044.1, AD-40055.1, AD- |
| | | | | 40067.1, AD-40061.1, AD-40050.1, AD-40073.1, AD- |
| | | | | 40079.1 |
| AGUUAUGGAAUU | 2676 | AAUUCCAUAACU | 2677 | AD-40085.1, AD-40044.1, AD-40067.1, AD- |
| | | | | 40056.1, AD-40061.1, AD-40050.1, AD-40073.1, AD- |
| | | | | 40079.1 |
| GUUAUGGAAUUC | 2678 | GAAUUCCAUAAC | 2679 | AD-40062.1, AD-40085.1, AD-40044.1, AD- |
| | | | | 40067.1, AD-40056.1, AD-40050.1, AD-40073.1, AD- |
| | | | | 40079.1 |
| UUAUGGAAUUCC | 2680 | GGAAUUCCAUAA | 2681 | AD-40068.1, AD-40062.1, AD-40085.1, AD- |
| | | | | 40044.1, AD-40056.1, AD-40050.1, AD-40073.1, AD- |
| | | | | 40079.1 |
| UAUGGAAUUCCU | 2682 | AGGAAUUCCAUA | 2683 | AD-40074.1, AD-40068.1, AD-40062.1, AD- |
| | | | | 40085.1, AD-40044.1, AD-40056.1, AD-40050.1, AD- |
| | | | | 40079.1 |
| AUGGAAUUCCUU | 2684 | AAGGAAUUCCAU | 2685 | AD-40080.1, AD-40074.1, AD-40068.1, AD- |
| | | | | 40062.1, AD-40085.1, AD-40044.1, AD-40056.1, AD- |
| | | | | 40050.1 |
| UGGAAUUCCUUU | 2686 | AAAGGAAUUCCA | 2687 | AD-40080.1, AD-40074.1, AD-40068.1, AD- |
| | | | | 40062.1, AD-40044.1, AD-40056.1, AD-40050.1 |
| GGAAUUCCUUUU | 2688 | AAAAGGAAUUCC | 2689 | AD-40080.1, AD-40074.1, AD-40068.1, AD- |
| | | | | 40062.1, AD-40056.1, AD-40050.1, AD-38131.1 |
| GAAUUCCUUUUA | 2690 | UAAAAGGAAUUC | 2691 | AD-40080.1, AD-40074.1, AD-40068.1, AD- |
| | | | | 40062.1, AD-38137.1, AD-40056.1, AD-38131.1 |
| AAUUCCUUUUAU | 2692 | AUAAAAGGAAUU | 2693 | AD-40080.1, AD-38143.1, AD-40074.1, AD- |
| | | | | 40068.1, AD-40062.1, AD-38137.1, AD-38131.1 |
| AUUCCUUUUAUU | 2694 | AAUAAAAGGAAU | 2695 | AD-40080.1, AD-38149.1, AD-38143.1, AD- |
| | | | | 40074.1, AD-40068.1, AD-38137.1, AD-38131.1 |
| UUCCUUUUAUUG | 2696 | CAAUAAAAGGAA | 2697 | AD-40080.1, AD-38149.1, AD-38143.1, AD- |
| | | | | 40074.1, AD-38137.1, AD-38155.1, AD-38131.1 |
| UCCUUUUAUUGA | 2698 | UCAAUAAAAGGA | 2699 | AD-40080.1, AD-38149.1, AD-38143.1, AD- |
| | | | | 38137.1, AD-38161.1, AD-38155.1, AD-38131.1 |
| CCUUUUAUUGAA | 2700 | UUCAAUAAAAGG | 2701 | AD-38149.1, AD-38143.1, AD-38137.1, AD- |
| | | | | 38161.1, AD-38167.1, AD-38155.1, AD-38131.1 |
| CUUUUAUUGAAA | 2702 | UUUCAAUAAAAG | 2703 | AD-38149.1, AD-38143.1, AD-38137.1, AD- |
| | | | | 38161.1, AD-38173.1, AD-38167.1, AD-38155.1, AD- |
| | | | | 38131.1 |
| UUUUAUUGAAAC | 2704 | GUUUCAAUAAAA | 2705 | AD-38149.1, AD-38143.1, AD-38132.1, AD- |
| | | | | 38137.1, AD-38161.1, AD-38173.1, AD-38167.1, AD- |
| | | | | 38155.1 |
| UUUAUUGAAACA | 2706 | UGUUUCAAUAAA | 2707 | AD-38149.1, AD-38143.1, AD-38132.1, AD- |
| | | | | 38161.1, AD-38173.1, AD-38138.1, AD-38167.1, AD- |
| | | | | 38155.1 |
| UUAUUGAAACAU | 2708 | AUGUUUCAAUAA | 2709 | AD-38149.1, AD-38132.1, AD-38161.1, AD- |
| | | | | 38173.1, AD-38138.1, AD-38167.1, AD-38155.1, AD- |
| | | | | 38144.1 |
| UAUUGAAACAUC | 2710 | GAUGUUUCAAUA | 2711 | AD-38132.1, AD-38161.1, AD-38173.1, AD- |
| | | | | 38138.1, AD-38167.1, AD-38155.1, AD-38150.1, AD- |
| | | | | 38144.1 |
| AUUGAAACAUCA | 2712 | UGAUGUUUCAAU | 2713 | AD-38132.1, AD-38156.1, AD-38161.1, AD- |
| | | | | 38173.1, AD-38138.1, AD-38167.1, AD-38150.1, AD- |
| | | | | 38144.1 |
| UUGAAACAUCAG | 2714 | CUGAUGUUUCAA | 2715 | AD-38132.1, AD-38162.1, AD-38156.1, AD- |
| | | | | 38173.1, AD-38138.1, AD-38167.1, AD-38150.1, AD- |
| | | | | 38144.1 |
| UGAAACAUCAGC | 2716 | GCUGAUGUUUCA | 2717 | AD-38132.1, AD-38162.1, AD-38156.1, AD- |
| | | | | 38168.1, AD-38173.1, AD-38138.1, AD-38150.1, AD- |
| | | | | 38144.1 |
| GAAACAUCAGCA | 2718 | UGCUGAUGUUUC | 2719 | AD-38174.1, AD-38132.1, AD-38162.1, AD- |
| | | | | 38156.1, AD-38168.1, AD-38138.1, AD-38150.1, AD- |
| | | | | 38144.1 |
| AAACAUCAGCAA | 2720 | UUGCUGAUGUUU | 2721 | AD-38174.1, AD-38162.1, AD-35667.1, AD- |
| | | | | 38156.1, AD-38168.1, AD-38138.1, AD-38150.1, AD- |
| | | | | 38144.1 |
| AACAUCAGGAAA | 2722 | UUUGCUGAUGUU | 2723 | AD-38174.1, AD-35673.1, AD-38162.1, AD- |
| | | | | 35667.1, AD-38156.1, AD-38168.1, AD-38150.1, AD- |
| | | | | 38144.1 |
| ACAUCAGCAAAG | 2724 | CUUUGCUGAUGU | 2725 | AD-38174.1, AD-35673.1, AD-38162.1, AD- |
| | | | | 35667.1, AD-35679.1, AD-38156.1, AD-38168.1, AD- |
| | | | | 38150.1 |
| CAUCAGCAAAGA | 2726 | UCUUUGCUGAUG | 2727 | AD-35685.1, AD-38174.1, AD-35673.1, AD- |
| | | | | 38162.1, AD-35667.1, AD-35679.1, AD-38156.1, AD- |
| | | | | 38168.1 |
| AUCAGCAAAGAC | 2728 | GUCUUUGCUGAU | 2729 | AD-35685.1, AD-38174.1, AD-35673.1, AD- |
| | | | | 38162.1, AD-35667.1, AD-35679.1, AD-38168.1, AD- |
| | | | | 35691.1 |
| UCAGCAAAGACA | 2730 | UGUCUUUGCUGA | 2731 | AD-35685.1, AD-38174.1, AD-35673.1, AD- |
| | | | | 35667.1, AD-35679.1, AD-38168.1, AD-35691.1 |
| CAGCAAAGACAA | 2732 | UUGUCUUUGCUG | 2733 | AD-35685.1, AD-38174.1, AD-35673.1, AD- |
| | | | | 35667.1, AD-35679.1, AD-35691.1 |
| AGCAAAGACAAG | 2734 | CUUGUCUUUGCU | 2735 | AD-35685.1, AD-35673.1, AD-35667.1, AD- |
| | | | | 35679.1, AD-35691.1 |
| GCAAAGACAAGA | 2736 | UCUUGUCUUUGC | 2737 | AD-35685.1, AD-35673.1, AD-35679.1, AD-35691.1 |
| CAAAGACAAGAC | 2738 | GUCUUGUCUUUG | 2739 | AD-35685.1, AD-35679.1, AD-35691.1 |
| AAAGACAAGACA | 2740 | UGUCUUGUCUUU | 2741 | AD-35685.1, AD-35691.1 |

[3548] The position (“Pos”) in NM_000336.2 is indicated. 12 exemplary nt of the overlap in the sense and anti-sense strand are presented; in many cases, the overlap is actually longer.

### Example 3. Efficacy of Kras RNAi Agents

[3549] KRAS RNAi agents were tested for efficacy, and the results are shown in Tables 5 and 6, below.

In Vitro Screeninq: Cell culture and transfections: RKO cells (ATCC, Manassas, VA) are grown to near confluence at 37° C. in an atmosphere of 5% CO₂ in McCoy's Medium (ATCC) supplemented with 10% FBS, streptomycin, and glutamine (ATCC) before being released from the plate by trypsinization. Transfection is carried out by adding 14.8 μl of Opti-MEM plus 0.2 μl of Lipofectamine RNAiMax per well (Invitrogen, Carlsbad, CA, cat #13778-150) to 5 μl of siRNA duplexes per well into a 96-well plate and incubated at room temperature for 15 minutes. 80 μl of complete growth media without antibiotic containing ˜2×10⁴ RKO cells are then added to the siRNA mixture. Cells are incubated for either 24 hours prior to RNA purification. Single dose experiments are performed at 10 nM and in some cases 0.1M final duplex concentration and dose response experiments are done at 10, 1, 0.5, 0.1, 0.05, 0.01, 0.005, 0.001, 0.0005, 0.0001, 0.00005, 0.00001 nM final duplex concentration.

[3550] Total RNA isolation using DYNABEADS mRNA Isolation Kit (Invitrogen, part #: 610-12): Cells are harvested and lysed in 150 μl of Lysis/Binding Buffer then mixed for 5 minute at 850 rpm using an Eppendorf Thermomixer (the mixing speed is the same throughout the process). Ten microliters of magnetic beads and 80 μl Lysis/Binding Buffer mixture are added to a round bottom plate and mixed for 1 minute. Magnetic beads are captured using magnetic stand and the supernatant is removed without disturbing the beads. After removing supernatant, the lysed cells are added to the remaining beads and mixed for 5 minutes. After removing supernatant, magnetic beads are washed 2 times with 150 μl Wash Buffer A and mixed for 1 minute. Beads are capture again and supernatant removed. Beads are then washed with 150 μl Wash Buffer B, captured and supernatant is removed. Beads are next washed with 150 μl Elution Buffer, captured and supernatant removed. Beads are allowed to dry for 2 minutes. After drying, 50 μl of Elution Buffer is added and mixed for 5 minutes at 70° C. Beads are captured on magnet for 5 minutes. 40 μl of supernatant is removed and added to another 96 well plate.

cDNA Synthesis Using ABI High Capacity cDNA Reverse Transcription Kit (Applied Biosystems, Foster City, CA, Cat #4368813):

[3551] A master mix of 2 μl 10× Buffer, 0.8 μl 25×dNTPs, 2 μl Random primers, 1 μl Reverse Transcriptase, 1 μl RNase inhibitor and 3.2 μl of H₂O per reaction are added into 10 μl total RNA. cDNA is generated using a Bio-Rad C-1000 or S-1000 thermal cycler (Hercules, CA) through the following steps: 25° C. 10 min, 37° C. 120 min, 85° C. 5 sec, 4° C. hold.

### Real Time PCR:

[3552] 2 μl of cDNA are added to a master mix containing 1 μl 18S TaqMan Probe (Applied Biosystems Cat #4319413E), 1 μl KRAS TaqMan probe (Applied Biosystems cat #HS00180035_m1, HS00932330_m1, or HS00610483) and 10 μl TaqMan Universal PCR Master Mix (Applied Biosystems Cat #4324018) per well in a MicroAmp Optical 96 well plate (Applied Biosystems cat #4326659). Real time PCR is done in an ABI 7900HT Real Time PCR system (Applied Biosystems) using the ΔΔCt(RQ) assay. Each duplex is tested in two independent transfections and each transfection is assayed in duplicate, unless otherwise noted in the summary tables.

[3553] Real time data are analyzed using the ΔΔCt method and normalized to assays performed with cells transfected with 10 nM AD-1955 to calculate relative fold change.

TABLE 5
KRAS RNAi agents, 0.1 and 10 nM KD at 24 hrs.

| | 10 nM | | .1 nM | | | | | |
|---|---|---|---|---|---|---|---|---|
| | KRAS | | KRAS | | 10 nM | .1 nM | 10 nM | .1 nM |
| Duplex ID | bio1 | bio2 | bio1 | bio2 | SD | SD | AVG | AVG |
| AD-35613.4 | 0.332 | 0.542 | 1.814 | 1.365 | 0.1484 | 0.3177 | 0.437 | 1.589 |
| AD-35572.4 | 0.403 | 0.666 | 1.850 | 1.571 | 0.1859 | 0.1975 | 0.535 | 1.711 |
| AD-35578.4 | 0.194 | 0.905 | 0.622 | 0.485 | 0.5030 | 0.0965 | 0.550 | 0.554 |
| AD-35584.4 | 0.171 | 0.239 | 0.953 | 0.654 | 0.0480 | 0.2115 | 0.205 | 0.803 |
| AD-35590.4 | 0.167 | 0.296 | 0.988 | 0.832 | 0.0919 | 0.1105 | 0.231 | 0.910 |
| AD-35596.4 | 0.782 | 0.837 | 1.540 | 1.263 | 0.0392 | 0.1962 | 0.809 | 1.402 |
| AD-35602.4 | 1.013 | 0.915 | 1.264 | 0.934 | 0.0694 | 0.2334 | 0.964 | 1.099 |
| AD-35608.4 | 0.818 | 0.631 | 1.120 | 1.093 | 0.1321 | 0.0191 | 0.725 | 1.106 |
| AD-35614.4 | 0.898 | 1.025 | 1.929 | 1.195 | 0.0898 | 0.5194 | 0.961 | 1.562 |
| AD-35573.4 | 0.920 | 0.809 | 1.412 | 0.957 | 0.0785 | 0.3219 | 0.865 | 1.185 |
| AD-35579.4 | 0.794 | 0.946 | 1.694 | 1.244 | 0.1072 | 0.3189 | 0.870 | 1.469 |
| AD-35585.4 | 0.861 | 0.738 | 3.016 | 2.552 | 0.0870 | 0.3281 | 0.800 | 2.784 |
| AD-35591.4 | 0.458 | 0.325 | 1.238 | 1.073 | 0.0938 | 0.1162 | 0.392 | 1.156 |
| AD-35597.4 | 0.948 | 0.897 | 1.523 | 0.864 | 0.0358 | 0.4657 | 0.922 | 1.194 |
| AD-35603.4 | 0.401 | 0.405 | 0.817 | 0.618 | 0.0025 | 0.1402 | 0.403 | 0.718 |
| AD-35609.4 | 0.168 | 0.165 | 0.503 | 0.320 | 0.0022 | 0.1295 | 0.167 | 0.411 |
| AD-35615.4 | 0.555 | 0.620 | 1.397 | 0.818 | 0.0460 | 0.4099 | 0.587 | 1.108 |
| AD-35574.4 | 0.762 | 0.650 | 1.009 | 0.643 | 0.0790 | 0.2590 | 0.706 | 0.826 |
| AD-35580.1 | 0.436 | 0.398 | 1.334 | 0.768 | 0.0275 | 0.4003 | 0.417 | 1.051 |
| AD-35586.4 | 0.242 | 0.266 | 0.908 | 0.577 | 0.0175 | 0.2337 | 0.254 | 0.743 |
| AD-35592.4 | 0.212 | 0.166 | 0.600 | 0.504 | 0.0324 | 0.0685 | 0.189 | 0.552 |
| AD-35598.4 | 0.828 | 0.893 | 1.318 | 1.147 | 0.0461 | 0.1205 | 0.861 | 1.232 |
| AD-35604.4 | 0.070 | 0.179 | 0.594 | 0.496 | 0.0770 | 0.0692 | 0.124 | 0.545 |
| AD-35610.4 | 0.415 | 0.633 | 1.068 | 0.887 | 0.1537 | 0.1275 | 0.524 | 0.977 |
| AD-35616.4 | 0.159 | 0.342 | 0.300 | 0.213 | 0.1288 | 0.0610 | 0.251 | 0.256 |
| AD-35575.4 | 0.470 | 0.689 | 0.789 | 0.749 | 0.1547 | 0.0284 | 0.579 | 0.769 |
| AD-35581.4 | 0.137 | 0.288 | 0.220 | 0.196 | 0.1064 | 0.0170 | 0.212 | 0.208 |
| AD-35587.4 | 0.637 | 0.670 | 1.059 | 0.975 | 0.0231 | 0.0591 | 0.653 | 1.017 |
| AD-35593.4 | 0.200 | 0.463 | 0.724 | 0.489 | 0.1859 | 0.1661 | 0.332 | 0.607 |
| AD-35599.4 | 0.685 | 1.281 | 1.273 | 0.952 | 0.4217 | 0.2266 | 0.983 | 1.113 |
| AD-35605.4 | 0.564 | 0.798 | 1.423 | 0.897 | 0.1649 | 0.3718 | 0.681 | 1.160 |
| AD-35611.4 | 0.644 | 0.844 | 1.189 | 0.922 | 0.1418 | 0.1887 | 0.744 | 1.055 |
| AD-35617.4 | 0.219 | 0.213 | 0.594 | 0.625 | 0.0047 | 0.0220 | 0.216 | 0.609 |
| AD-35576.4 | 0.451 | 0.365 | 1.167 | 0.928 | 0.0604 | 0.1693 | 0.408 | 1.047 |
| AD-35588.4 | 0.185 | 0.290 | 0.442 | 0.323 | 0.0736 | 0.0841 | 0.237 | 0.383 |
| AD-35667.1 | 0.497 | 0.623 | 1.030 | 0.857 | 0.0897 | 0.1228 | 0.560 | 0.943 |
| AD-35673.1 | 0.367 | 0.405 | 0.771 | 0.693 | 0.0268 | 0.0547 | 0.386 | 0.732 |
| AD-35679.1 | 0.217 | 0.330 | 0.329 | 0.293 | 0.0798 | 0.0258 | 0.274 | 0.311 |
| AD-35685.1 | 0.310 | 0.255 | 0.345 | 0.339 | 0.0390 | 0.0045 | 0.283 | 0.342 |
| AD-35691.1 | 0.258 | 0.257 | 0.955 | 0.535 | 0.0005 | 0.2968 | 0.258 | 0.745 |
| AD-35557.1 | 0.843 | 0.624 | 1.056 | 0.947 | 0.1547 | 0.0766 | 0.734 | 1.002 |
| AD-35618.1 | 0.447 | 0.425 | 0.611 | 0.439 | 0.0157 | 0.1218 | 0.436 | 0.525 |
| AD-35569.1 | 0.319 | 0.404 | 0.805 | 0.715 | 0.0605 | 0.0636 | 0.362 | 0.760 |
| AD-35534.1 | 0.578 | 0.582 | 0.877 | 0.944 | 0.0028 | 0.0475 | 0.580 | 0.910 |
| AD-35582.1 | 0.518 | 0.974 | 0.982 | 0.977 | 0.3223 | 0.0035 | 0.746 | 0.980 |
| AD-35594.1 | 0.441 | 0.317 | 0.884 | 0.679 | 0.0877 | 0.1451 | 0.379 | 0.782 |
| AD-35600.1 | 0.207 | 0.394 | 0.309 | 0.233 | 0.1322 | 0.0539 | 0.301 | 0.271 |
| AD-35606.1 | 0.285 | 0.177 | 0.384 | 0.346 | 0.0770 | 0.0272 | 0.231 | 0.365 |
| AD-35612.1 | 1.070 | 0.947 | 1.027 | 0.827 | 0.0870 | 0.1415 | 1.009 | 0.927 |
| AD-38127.1 | 0.217 | 0.162 | 0.594 | 0.491 | 0.0388 | 0.0728 | 0.189 | 0.542 |
| AD-38128.1 | 0.157 | 0.146 | 0.521 | 0.366 | 0.0072 | 0.1095 | 0.151 | 0.443 |
| AD-38164.1 | 1.112 | 1.993 | 1.213 | 0.982 | 0.6224 | 0.1633 | 1.553 | 1.097 |
| AD-38165.1 | 0.619 | 0.731 | 1.002 | 0.837 | 0.0790 | 0.1173 | 0.675 | 0.920 |
| AD-38160.1 | 1.159 | 1.129 | 1.300 | 0.920 | 0.0216 | 0.2685 | 1.144 | 1.110 |
| AD-38161.1 | 0.144 | 0.125 | 0.355 | 0.319 | 0.0130 | 0.0256 | 0.134 | 0.337 |
| AD-38133.1 | 0.164 | 0.142 | 0.574 | 0.590 | 0.0154 | 0.0113 | 0.153 | 0.582 |
| AD-38170.1 | 0.147 | 0.191 | 0.734 | 0.487 | 0.0311 | 0.1744 | 0.169 | 0.611 |
| AD-38171.1 | 0.858 | 1.067 | 1.408 | 1.101 | 0.1480 | 0.2168 | 0.962 | 1.254 |
| AD-38166.1 | 0.319 | 0.486 | 0.846 | 0.848 | 0.1184 | 0.0016 | 0.402 | 0.847 |
| AD-38167.1 | 0.119 | 0.182 | 0.740 | 0.546 | 0.0440 | 0.1368 | 0.150 | 0.643 |
| AD-38139.1 | 0.148 | 0.085 | 0.259 | 0.198 | 0.0445 | 0.0433 | 0.116 | 0.229 |
| AD-38134.1 | 0.117 | 0.190 | 0.248 | 0.380 | 0.0514 | 0.0936 | 0.154 | 0.314 |
| AD-38129.1 | 0.776 | 0.860 | 1.038 | 1.089 | 0.0596 | 0.0356 | 0.818 | 1.064 |
| AD-38130.1 | 0.528 | 0.820 | 0.900 | 0.846 | 0.2064 | 0.0386 | 0.674 | 0.873 |
| AD-38172.1 | 0.076 | 0.094 | 0.289 | 0.247 | 0.0127 | 0.0298 | 0.085 | 0.268 |
| AD-38145.1 | 0.150 | 0.128 | 0.440 | 0.371 | 0.0154 | 0.0488 | 0.139 | 0.406 |
| AD-38135.1 | 0.959 | 1.429 | 0.965 | 0.900 | 0.3321 | 0.0459 | 1.194 | 0.932 |
| AD-38131.1 | 0.135 | 0.173 | 0.414 | 0.279 | 0.0267 | 0.0955 | 0.154 | 0.347 |
| AD-38173.1 | 0.609 | 0.988 | 1.132 | 1.373 | 0.2681 | 0.1707 | 0.798 | 1.253 |
| AD-38151.1 | 0.211 | 0.181 | 0.378 | 0.554 | 0.0218 | 0.1246 | 0.196 | 0.466 |
| AD-38140.1 | 0.652 | 0.794 | 1.087 | 1.045 | 0.1004 | 0.0298 | 0.723 | 1.066 |
| AD-38141.1 | 0.450 | 0.512 | 1.002 | 0.840 | 0.0433 | 0.1147 | 0.481 | 0.921 |
| AD-38136.1 | 0.053 | 0.096 | 0.150 | 0.121 | 0.0301 | 0.0199 | 0.074 | 0.136 |
| AD-38137.1 | 0.283 | 0.259 | 0.677 | 0.580 | 0.0169 | 0.0687 | 0.271 | 0.628 |
| AD-38132.1 | 0.256 | 0.333 | 0.669 | 0.726 | 0.0543 | 0.0404 | 0.294 | 0.697 |
| AD-38157.1 | 0.760 | 0.543 | 0.768 | 0.900 | 0.1536 | 0.0937 | 0.651 | 0.834 |
| AD-38146.1 | 0.249 | 0.240 | 0.617 | 0.584 | 0.0065 | 0.0237 | 0.245 | 0.600 |
| AD-38147.1 | 0.271 | 0.361 | 0.858 | 0.909 | 0.0638 | 0.0365 | 0.316 | 0.883 |
| AD-38142.1 | 0.389 | 0.634 | 0.971 | 0.712 | 0.1732 | 0.1831 | 0.512 | 0.841 |
| AD-38143.1 | 0.378 | 0.657 | 0.920 | 0.808 | 0.1966 | 0.0791 | 0.518 | 0.864 |
| AD-38163.1 | 0.088 | 0.083 | 0.143 | 0.172 | 0.0036 | 0.0206 | 0.085 | 0.158 |
| AD-38152.1 | 0.755 | 0.580 | 1.057 | 0.897 | 0.1238 | 0.1134 | 0.667 | 0.977 |
| AD-38153.1 | 0.727 | 0.781 | 0.855 | 1.006 | 0.0380 | 0.1067 | 0.754 | 0.930 |
| AD-38148.1 | 0.553 | 0.522 | 0.784 | 0.831 | 0.0215 | 0.0333 | 0.537 | 0.807 |
| AD-38149.1 | 0.269 | 0.295 | 0.607 | 0.641 | 0.0186 | 0.0242 | 0.282 | 0.624 |
| AD-38138.1 | 0.330 | 0.417 | 0.402 | 0.448 | 0.0615 | 0.0321 | 0.373 | 0.425 |
| AD-38169.1 | 0.380 | 0.248 | 0.626 | 0.540 | 0.0929 | 0.0607 | 0.314 | 0.583 |
| AD-38158.1 | 0.699 | 0.611 | 0.800 | 1.250 | 0.0619 | 0.3184 | 0.655 | 1.025 |
| AD-38159.1 | 0.161 | 0.122 | 0.210 | 0.227 | 0.0274 | 0.0123 | 0.142 | 0.219 |
| AD-38154.1 | 0.212 | 0.172 | 0.628 | 0.507 | 0.0286 | 0.0858 | 0.192 | 0.567 |
| AD-38155.1 | 0.198 | 0.215 | 0.331 | 0.309 | 0.0122 | 0.0153 | 0.207 | 0.320 |
| AD-39683.1 | 0.471 | 0.536 | 1.135 | 0.812 | 0.0461 | 0.2283 | 0.504 | 0.973 |
| AD-39689.1 | 0.630 | 0.627 | 1.148 | 0.979 | 0.0025 | 0.1194 | 0.629 | 1.064 |
| AD-39695.1 | 0.659 | 0.557 | 1.222 | 1.022 | 0.0723 | 0.1414 | 0.608 | 1.122 |
| AD-39701.1 | 1.218 | 1.231 | 0.704 | 0.724 | 0.0092 | 0.0141 | 1.225 | 0.714 |
| AD-39707.1 | 0.384 | 0.160 | 1.387 | 1.087 | 0.1584 | 0.2121 | 0.272 | 1.237 |
| AD-39713.1 | 1.157 | 0.481 | 1.128 | 1.228 | 0.4778 | 0.0707 | 0.819 | 1.178 |
| AD-39719.1 | 0.885 | 0.631 | 1.178 | 1.189 | 0.1791 | 0.0073 | 0.758 | 1.183 |
| AD-39725.1 | 1.105 | 1.074 | 1.203 | 1.751 | 0.0222 | 0.3878 | 1.089 | 1.477 |
| AD-39684.1 | 0.321 | 0.186 | 0.954 | 1.222 | 0.0952 | 0.1895 | 0.253 | 1.088 |
| AD-39690.1 | 0.825 | 0.828 | 0.832 | 0.852 | 0.0019 | 0.0139 | 0.826 | 0.842 |
| AD-39696.1 | 1.071 | 0.996 | 1.087 | 0.883 | 0.0532 | 0.1443 | 1.034 | 0.985 |
| AD-39702.1 | 0.360 | 0.334 | 1.050 | 1.285 | 0.0179 | 0.1660 | 0.347 | 1.167 |
| AD-39708.1 | 0.757 | 0.969 | 1.049 | 1.091 | 0.1494 | 0.0299 | 0.863 | 1.070 |
| AD-39714.1 | 0.953 | 1.056 | 0.779 | 0.639 | 0.0731 | 0.0995 | 1.004 | 0.709 |
| AD-39720.1 | 0.210 | 0.182 | 0.404 | 0.691 | 0.0199 | 0.2030 | 0.196 | 0.548 |
| AD-39726.1 | 0.774 | 0.968 | 0.921 | 1.068 | 0.1372 | 0.1037 | 0.871 | 0.995 |
| AD-39685.1 | 1.022 | 1.358 | 1.053 | 0.997 | 0.2378 | 0.0399 | 1.190 | 1.025 |
| AD-39691.1 | 0.494 | 0.380 | 0.913 | 0.967 | 0.0806 | 0.0379 | 0.437 | 0.940 |
| AD-39697.1 | 0.892 | 1.333 | 0.937 | 1.344 | 0.3125 | 0.2883 | 1.113 | 1.140 |
| AD-39703.1 | 1.071 | 1.141 | 0.983 | 0.864 | 0.0497 | 0.0842 | 1.106 | 0.924 |
| AD-39709.1 | 0.905 | 1.086 | 0.944 | 1.079 | 0.1284 | 0.0953 | 0.995 | 1.011 |
| AD-39715.1 | 0.347 | 0.385 | 1.398 | 1.013 | 0.0265 | 0.2722 | 0.366 | 1.205 |
| AD-39721.1 | 0.911 | 0.781 | 1.128 | 1.119 | 0.0918 | 0.0066 | 0.846 | 1.123 |
| AD-39727.1 | 0.267 | 0.271 | 0.911 | 1.038 | 0.0028 | 0.0894 | 0.269 | 0.975 |
| AD-39686.1 | 0.897 | 0.490 | 0.781 | 0.633 | 0.2877 | 0.1044 | 0.694 | 0.707 |
| AD-39692.1 | 0.936 | 0.879 | 0.814 | 0.802 | 0.0403 | 0.0083 | 0.908 | 0.808 |
| AD-39698.1 | 1.257 | 1.375 | 0.829 | 0.876 | 0.0834 | 0.0333 | 1.316 | 0.853 |
| AD-39704.1 | 1.211 | 1.189 | 0.909 | 0.735 | 0.0155 | 0.1234 | 1.200 | 0.822 |
| AD-39710.1 | 1.389 | 1.136 | 0.881 | 0.862 | 0.1789 | 0.0130 | 1.263 | 0.871 |
| AD-39716.1 | 0.787 | 0.943 | 0.991 | 0.963 | 0.1099 | 0.0199 | 0.865 | 0.977 |
| AD-39722.1 | 1.147 | 1.049 | 0.872 | 0.716 | 0.0688 | 0.1108 | 1.098 | 0.794 |
| AD-39728.1 | 0.846 | 0.974 | 0.891 | 0.928 | 0.0902 | 0.0264 | 0.910 | 0.909 |
| AD-39683.1 | 0.374 | 0.307 | 0.996 | 0.982 | 0.0469 | 0.0098 | 0.341 | 0.989 |
| AD-39687.1 | 1.015 | 0.775 | 1.035 | 1.642 | 0.1695 | 0.4296 | 0.895 | 1.338 |
| AD-39689.1 | 0.340 | 0.328 | 0.769 | 0.762 | 0.0090 | 0.0047 | 0.334 | 0.765 |
| AD-39693.1 | 1.262 | 0.832 | 0.855 | 0.967 | 0.3040 | 0.0791 | 1.047 | 0.911 |
| AD-39699.1 | 1.173 | 1.113 | 1.113 | 1.307 | 0.0423 | 0.1375 | 1.143 | 1.210 |
| AD-39705.1 | 0.622 | 0.582 | 0.730 | 0.807 | 0.0282 | 0.0542 | 0.602 | 0.768 |
| AD-39711.1 | 1.996 | 0.864 | 0.720 | 0.829 | 0.8006 | 0.0770 | 1.430 | 0.774 |
| AD-39717.1 | 0.551 | 0.523 | 1.136 | 1.064 | 0.0197 | 0.0511 | 0.537 | 1.100 |
| AD-39723.1 | 1.179 | 0.695 | 0.877 | 0.873 | 0.3428 | 0.0025 | 0.937 | 0.875 |
| AD-39729.1 | 1.083 | 0.864 | 0.898 | 0.873 | 0.1547 | 0.0178 | 0.973 | 0.885 |
| AD-39688.1 | 0.341 | 0.492 | 0.700 | 0.782 | 0.1064 | 0.0577 | 0.416 | 0.741 |
| AD-39694.1 | 0.230 | 0.327 | 0.923 | 1.087 | 0.0685 | 0.1164 | 0.279 | 1.005 |
| AD-39700.1 | 0.529 | 0.760 | 0.600 | 0.671 | 0.1631 | 0.0497 | 0.645 | 0.635 |
| AD-39706.1 | 0.180 | 0.217 | 0.447 | 0.522 | 0.0263 | 0.0528 | 0.198 | 0.484 |
| AD-39712.1 | 0.330 | 0.394 | 0.798 | 0.777 | 0.0452 | 0.0147 | 0.362 | 0.787 |
| AD-39718.1 | 0.672 | 0.798 | 0.688 | 0.724 | 0.0889 | 0.0255 | 0.735 | 0.706 |
| AD-39724.1 | 0.599 | 1.136 | 0.643 | 0.680 | 0.3804 | 0.0261 | 0.868 | 0.661 |
| AD-39730.1 | 0.996 | 1.459 | 0.848 | 0.784 | 0.3271 | 0.0448 | 1.228 | 0.816 |
| AD-39736.1 | 1.085 | 1.121 | 0.733 | 0.883 | 0.0254 | 0.1064 | 1.103 | 0.808 |
| AD-39742.1 | 0.518 | 0.561 | 0.651 | 0.703 | 0.0308 | 0.0374 | 0.539 | 0.677 |
| AD-39748.1 | 0.445 | 0.609 | 0.772 | 0.788 | 0.1163 | 0.0113 | 0.527 | 0.780 |
| AD-39754.1 | 0.549 | 0.823 | 0.691 | 0.894 | 0.1942 | 0.1438 | 0.686 | 0.793 |
| AD-39760.1 | 0.233 | 0.210 | 0.417 | 0.747 | 0.0158 | 0.2332 | 0.221 | 0.582 |
| AD-39766.1 | 0.700 | 0.882 | 0.849 | 0.836 | 0.1291 | 0.0095 | 0.791 | 0.843 |
| AD-39772.1 | 0.323 | 0.379 | 0.797 | 0.870 | 0.0393 | 0.0519 | 0.351 | 0.833 |
| AD-39731.1 | 0.804 | 0.222 | 0.452 | 0.417 | 0.4116 | 0.0251 | 0.513 | 0.434 |
| AD-39737.1 | 0.450 | 0.347 | 0.737 | 0.768 | 0.0726 | 0.0219 | 0.399 | 0.753 |
| AD-39743.1 | 0.375 | 0.533 | 0.794 | 0.852 | 0.1112 | 0.0415 | 0.454 | 0.823 |
| AD-39695.1 | 0.610 | 0.492 | 0.831 | 0.821 | 0.0836 | 0.0070 | 0.551 | 0.826 |
| AD-39749.1 | 0.292 | 0.121 | 0.545 | 0.695 | 0.1205 | 0.1059 | 0.206 | 0.620 |
| AD-39755.1 | 0.226 | 0.275 | 0.874 | 1.170 | 0.0350 | 0.2093 | 0.251 | 1.022 |
| AD-39761.1 | 0.821 | 0.841 | 0.942 | 1.101 | 0.0141 | 0.1124 | 0.831 | 1.022 |
| AD-39767.1 | 0.360 | 0.374 | 0.730 | 0.711 | 0.0097 | 0.0134 | 0.367 | 0.720 |
| AD-39773.1 | 0.223 | 0.236 | 0.802 | 1.159 | 0.0096 | 0.2520 | 0.229 | 0.980 |
| AD-39732.1 | 0.446 | 0.662 | 1.593 | 1.181 | 0.1532 | 0.2914 | 0.554 | 1.387 |
| AD-39738.1 | 0.257 | 0.147 | 1.369 | 1.482 | 0.0776 | 0.0801 | 0.202 | 1.426 |
| AD-39744.1 | 0.259 | 0.200 | 1.097 | 0.871 | 0.0414 | 0.1592 | 0.230 | 0.984 |
| AD-39750.1 | 0.182 | 0.302 | 0.642 | 0.782 | 0.0853 | 0.0988 | 0.242 | 0.712 |
| AD-39756.1 | 0.568 | 0.548 | 0.808 | 0.993 | 0.0144 | 0.1308 | 0.558 | 0.900 |
| AD-39762.1 | 0.684 | 0.916 | 0.783 | 0.929 | 0.1641 | 0.1031 | 0.800 | 0.856 |
| AD-39768.1 | 0.929 | 1.239 | 1.000 | 1.033 | 0.2194 | 0.0239 | 1.084 | 1.016 |
| AD-39774.1 | 0.391 | 0.447 | 1.087 | 1.087 | 0.0399 | 0.0003 | 0.419 | 1.087 |
| AD-39733.1 | 0.605 | 0.569 | 1.020 | 1.212 | 0.0251 | 0.1355 | 0.587 | 1.116 |
| AD-39739.1 | 0.950 | 1.271 | 0.959 | 1.030 | 0.2265 | 0.0501 | 1.111 | 0.994 |
| AD-39701.1 | 0.798 | 1.193 | 1.221 | 1.018 | 0.2794 | 0.1437 | 0.996 | 1.120 |
| AD-39745.1 | 0.257 | 0.212 | 1.116 | 1.226 | 0.0317 | 0.0779 | 0.234 | 1.171 |
| AD-39751.1 | 0.260 | 0.248 | 1.037 | 2.286 | 0.0085 | 0.8828 | 0.254 | 1.662 |
| AD-39757.1 | 0.319 | 0.566 | 1.098 | 0.949 | 0.1753 | 0.1053 | 0.443 | 1.023 |
| AD-39763.1 | 0.235 | 0.300 | 0.667 | 0.531 | 0.0463 | 0.0961 | 0.267 | 0.599 |
| AD-39769.1 | 0.637 | 0.531 | 0.526 | 0.826 | 0.0749 | 0.2120 | 0.584 | 0.676 |
| AD-39775.1 | 0.472 | 0.526 | 0.760 | 1.002 | 0.0382 | 0.1711 | 0.499 | 0.881 |
| AD-39734.1 | 0.915 | 0.920 | 0.751 | 0.837 | 0.0035 | 0.0606 | 0.917 | 0.794 |
| AD-39740.1 | 0.323 | 0.302 | 0.406 | 0.632 | 0.0145 | 0.1593 | 0.312 | 0.519 |
| AD-39746.1 | 0.553 | 0.702 | 0.949 | 1.145 | 0.1058 | 0.1382 | 0.627 | 1.047 |
| AD-39752.1 | 0.440 | 0.577 | 0.855 | 0.860 | 0.0965 | 0.0030 | 0.509 | 0.857 |
| AD-39758.1 | 1.129 | 1.095 | 0.952 | 0.830 | 0.0238 | 0.0863 | 1.112 | 0.891 |
| AD-39764.1 | 1.125 | 0.898 | 1.205 | 1.405 | 0.1606 | 0.1409 | 1.011 | 1.305 |
| AD-39770.1 | 0.647 | 0.314 | 0.672 | 0.461 | 0.2356 | 0.1486 | 0.480 | 0.566 |
| AD-39776.1 | 1.013 | 0.970 | 1.035 | 0.739 | 0.0304 | 0.2092 | 0.992 | 0.887 |
| AD-39735.1 | 0.284 | 0.201 | 0.613 | 0.976 | 0.0588 | 0.2564 | 0.242 | 0.794 |
| AD-39741.1 | 0.177 | 0.188 | 0.526 | 0.806 | 0.0074 | 0.1977 | 0.182 | 0.666 |
| AD-39747.1 | 1.047 | 0.926 | 1.247 | 1.483 | 0.0854 | 0.1666 | 0.986 | 1.365 |
| AD-39753.1 | 1.082 | 0.823 | 1.034 | 1.662 | 0.1833 | 0.4437 | 0.953 | 1.348 |
| AD-39759.1 | 0.327 | 0.292 | 0.638 | 0.412 | 0.0252 | 0.1600 | 0.309 | 0.525 |
| AD-39765.1 | 1.099 | 0.596 | 1.270 | 1.027 | 0.3554 | 0.1714 | 0.847 | 1.148 |
| AD-39771.1 | 0.238 | 0.334 | 0.801 | 0.460 | 0.0679 | 0.2407 | 0.286 | 0.631 |
| AD-39778.1 | 0.217 | 0.250 | 0.502 | 0.354 | 0.0235 | 0.1042 | 0.233 | 0.428 |
| AD-39784.1 | 0.698 | 0.598 | 1.036 | 0.944 | 0.0708 | 0.0655 | 0.648 | 0.990 |
| AD-39790.1 | 0.150 | 0.260 | 0.614 | 0.787 | 0.0777 | 0.1221 | 0.205 | 0.700 |
| AD-39796.1 | 0.635 | 0.610 | 0.731 | 0.846 | 0.0178 | 0.0813 | 0.622 | 0.788 |
| AD-39802.1 | 0.349 | 0.150 | 0.898 | 0.970 | 0.1408 | 0.0509 | 0.249 | 0.934 |
| AD-39808.1 | 0.734 | 0.972 | 1.079 | 0.955 | 0.1680 | 0.0881 | 0.853 | 1.017 |
| AD-39814.1 | 1.070 | 1.294 | 0.979 | 0.968 | 0.1588 | 0.0074 | 1.182 | 0.974 |
| AD-39820.1 | 0.381 | 0.209 | 0.786 | 0.687 | 0.1218 | 0.0701 | 0.295 | 0.737 |
| AD-39779.1 | 0.744 | 0.889 | 1.038 | 0.942 | 0.1020 | 0.0683 | 0.817 | 0.990 |
| AD-39785.1 | 0.182 | 0.218 | 0.509 | 0.506 | 0.0255 | 0.0022 | 0.200 | 0.507 |
| AD-39791.1 | 0.214 | 0.308 | 0.556 | 0.519 | 0.0667 | 0.0260 | 0.261 | 0.537 |
| AD-39797.1 | 0.341 | 0.326 | 0.788 | 0.543 | 0.0100 | 0.1730 | 0.333 | 0.665 |
| AD-39803.1 | 0.229 | 0.210 | 0.808 | 0.648 | 0.0135 | 0.1133 | 0.220 | 0.728 |
| AD-39809.1 | 0.624 | 0.829 | 1.060 | 1.031 | 0.1450 | 0.0211 | 0.727 | 1.046 |
| AD-39815.1 | 0.441 | 0.449 | 0.862 | 0.852 | 0.0057 | 0.0072 | 0.445 | 0.857 |
| AD-39821.1 | 0.582 | 0.592 | 0.722 | 0.608 | 0.0071 | 0.0806 | 0.587 | 0.665 |
| AD-39780.1 | 0.748 | 0.784 | 0.973 | 0.976 | 0.0252 | 0.0025 | 0.766 | 0.974 |
| AD-39786.1 | 0.376 | 0.455 | 0.466 | 0.640 | 0.0557 | 0.1226 | 0.416 | 0.553 |
| AD-39792.1 | 1.195 | 1.019 | 0.908 | 1.168 | 0.1249 | 0.1835 | 1.107 | 1.038 |
| AD-39798.1 | 0.429 | 0.342 | 0.933 | 0.936 | 0.0615 | 0.0020 | 0.386 | 0.934 |
| AD-39804.1 | 0.551 | 0.588 | 0.942 | 0.959 | 0.0259 | 0.0119 | 0.570 | 0.950 |
| AD-39810.1 | 0.605 | 0.532 | 0.989 | 0.956 | 0.0518 | 0.0236 | 0.568 | 0.972 |
| AD-39764.1 | 1.112 | 1.027 | 0.961 | 0.746 | 0.0602 | 0.1522 | 1.070 | 0.854 |
| AD-39816.1 | 0.805 | 0.645 | 1.014 | 0.839 | 0.1130 | 0.1236 | 0.725 | 0.927 |
| AD-39770.1 | 0.420 | 0.371 | 0.858 | 0.887 | 0.0345 | 0.0201 | 0.396 | 0.873 |
| AD-39822.1 | 0.288 | 0.313 | 0.589 | 0.494 | 0.0178 | 0.0671 | 0.301 | 0.542 |
| AD-39781.1 | 0.276 | 0.379 | 0.404 | 0.305 | 0.0725 | 0.0701 | 0.328 | 0.354 |
| AD-39787.1 | 0.982 | 1.065 | 0.675 | 0.803 | 0.0584 | 0.0909 | 1.024 | 0.739 |
| AD-39793.1 | 0.165 | 0.291 | 0.487 | 0.488 | 0.0893 | 0.0007 | 0.228 | 0.487 |
| AD-39799.1 | 0.444 | 0.540 | 0.686 | 0.746 | 0.0675 | 0.0423 | 0.492 | 0.716 |
| AD-39805.1 | 0.295 | 0.250 | 0.474 | 0.421 | 0.0320 | 0.0371 | 0.273 | 0.448 |
| AD-39811.1 | 0.646 | 0.792 | 0.892 | 0.882 | 0.1030 | 0.0070 | 0.719 | 0.887 |
| AD-39817.1 | 0.583 | 0.824 | 0.848 | 0.846 | 0.1708 | 0.0012 | 0.703 | 0.847 |
| AD-39823.1 | 1.229 | 1.075 | 1.080 | 0.859 | 0.1083 | 0.1564 | 1.152 | 0.970 |
| AD-39782.1 | 0.605 | 0.757 | 1.162 | 0.883 | 0.1076 | 0.1972 | 0.681 | 1.022 |
| AD-39788.1 | 0.257 | 0.289 | 0.665 | 0.534 | 0.0227 | 0.0926 | 0.273 | 0.599 |
| AD-39794.1 | 0.667 | 0.699 | 1.196 | 1.102 | 0.0229 | 0.0668 | 0.683 | 1.149 |
| AD-39800.1 | 0.888 | 0.734 | 1.201 | 0.908 | 0.1092 | 0.2072 | 0.811 | 1.054 |
| AD-39806.1 | 0.505 | 0.637 | 0.630 | 0.849 | 0.0935 | 0.1549 | 0.571 | 0.739 |
| AD-39812.1 | 0.281 | 0.390 | 0.521 | 0.597 | 0.0771 | 0.0538 | 0.335 | 0.559 |
| AD-39818.1 | 0.999 | 1.049 | 0.789 | 0.936 | 0.0347 | 0.1044 | 1.024 | 0.863 |
| AD-39824.1 | 1.086 | 1.053 | 1.370 | 1.034 | 0.0235 | 0.2377 | 1.070 | 1.202 |
| AD-39783.1 | 0.460 | 0.731 | 0.736 | 0.822 | 0.1916 | 0.0609 | 0.595 | 0.779 |
| AD-39789.1 | 0.859 | 1.454 | 1.139 | 1.308 | 0.4213 | 0.1195 | 1.157 | 1.224 |
| AD-39795.1 | 1.165 | 0.901 | 1.015 | 0.916 | 0.1866 | 0.0698 | 1.033 | 0.965 |
| AD-39801.1 | 1.222 | 1.191 | 1.098 | 0.843 | 0.0216 | 0.1801 | 1.207 | 0.971 |
| AD-39807.1 | 0.776 | 0.807 | 1.007 | 1.002 | 0.0215 | 0.0036 | 0.791 | 1.004 |
| AD-39813.1 | 0.923 | 1.206 | 1.008 | 0.901 | 0.1998 | 0.0753 | 1.065 | 0.955 |
| AD-39819.1 | 0.952 | 1.021 | 1.024 | 0.916 | 0.0484 | 0.0765 | 0.986 | 0.970 |
| AD-39825.1 | 0.648 | 0.864 | 1.028 | 0.981 | 0.1529 | 0.0336 | 0.756 | 1.004 |
| AD-39776.1 | 0.795 | 1.019 | 0.891 | 1.046 | 0.1581 | 0.1094 | 0.907 | 0.969 |
| AD-39831.1 | 0.648 | 0.601 | 1.018 | 1.034 | 0.0334 | 0.0119 | 0.624 | 1.026 |
| AD-39837.1 | 0.799 | 0.984 | 0.969 | 0.903 | 0.1308 | 0.0463 | 0.891 | 0.936 |
| AD-39843.1 | 0.325 | 0.385 | 0.695 | 0.572 | 0.0427 | 0.0866 | 0.355 | 0.634 |
| AD-39849.1 | 0.702 | 1.075 | 0.903 | 0.969 | 0.2638 | 0.0469 | 0.889 | 0.936 |
| AD-39855.1 | 0.309 | 0.490 | 1.202 | 0.800 | 0.1280 | 0.2840 | 0.399 | 1.001 |
| AD-39861.1 | 0.762 | 1.162 | 1.020 | 1.000 | 0.2825 | 0.0141 | 0.962 | 1.010 |
| AD-39867.1 | 0.873 | 1.162 | 1.219 | 0.918 | 0.2040 | 0.2126 | 1.017 | 1.069 |
| AD-39826.1 | 1.358 | 1.043 | 1.148 | 0.961 | 0.2226 | 0.1320 | 1.201 | 1.055 |
| AD-39832.1 | 0.792 | 1.337 | 1.214 | 0.873 | 0.3849 | 0.2413 | 1.065 | 1.043 |
| AD-39838.1 | 0.429 | 0.270 | 0.793 | 0.530 | 0.1128 | 0.1859 | 0.349 | 0.661 |
| AD-39844.1 | 0.572 | 0.789 | 0.833 | 0.692 | 0.1536 | 0.0997 | 0.680 | 0.762 |
| AD-39850.1 | 0.535 | 0.231 | 0.505 | 0.529 | 0.2152 | 0.0169 | 0.383 | 0.517 |
| AD-39856.1 | 0.323 | 0.377 | 0.835 | 0.784 | 0.0384 | 0.0359 | 0.350 | 0.810 |
| AD-39862.1 | 0.405 | 0.429 | 0.835 | 0.615 | 0.0167 | 0.1552 | 0.417 | 0.725 |
| AD-39868.1 | 0.386 | 0.484 | 0.683 | 0.643 | 0.0697 | 0.0284 | 0.435 | 0.663 |
| AD-39735.1 | 0.168 | 0.255 | 0.439 | 0.294 | 0.0616 | 0.1026 | 0.211 | 0.366 |
| AD-39827.1 | 0.202 | 0.313 | 0.616 | 0.413 | 0.0787 | 0.1432 | 0.258 | 0.515 |
| AD-39833.1 | 0.190 | 0.492 | 1.007 | 1.026 | 0.2134 | 0.0135 | 0.341 | 1.017 |
| AD-39839.1 | 0.790 | 1.002 | 1.227 | 1.327 | 0.1503 | 0.0708 | 0.896 | 1.277 |
| AD-39845.1 | 0.192 | 0.213 | 0.391 | 0.218 | 0.0147 | 0.1220 | 0.202 | 0.304 |
| AD-39851.1 | 0.779 | 0.493 | 1.243 | 0.929 | 0.2022 | 0.2220 | 0.636 | 1.086 |
| AD-39857.1 | 0.602 | 1.444 | 0.992 | 0.692 | 0.5960 | 0.2120 | 1.023 | 0.842 |
| AD-39863.1 | 0.482 | 0.135 | 0.906 | 0.632 | 0.2449 | 0.1937 | 0.308 | 0.769 |
| AD-39869.1 | 0.357 | 0.025 | 0.799 | 0.558 | 0.2347 | 0.1708 | 0.191 | 0.678 |
| AD-39828.1 | 1.185 | 1.085 | 1.176 | 0.952 | 0.0707 | 0.1585 | 1.135 | 1.064 |
| AD-39834.1 | 1.140 | 1.273 | 1.315 | 1.075 | 0.0938 | 0.1698 | 1.207 | 1.195 |
| AD-39840.1 | 0.251 | 0.541 | 0.766 | 0.591 | 0.2050 | 0.1239 | 0.396 | 0.679 |
| AD-39846.1 | 0.635 | 0.646 | 1.044 | 0.984 | 0.0077 | 0.0425 | 0.641 | 1.014 |
| AD-39852.1 | 0.434 | 0.555 | 0.707 | 0.719 | 0.0857 | 0.0085 | 0.494 | 0.713 |
| AD-39858.1 | 0.169 | 0.192 | 0.363 | 0.268 | 0.0160 | 0.0670 | 0.180 | 0.316 |
| AD-39864.1 | 1.612 | 1.161 | 0.825 | 0.919 | 0.3189 | 0.0665 | 1.387 | 0.872 |
| AD-39870.1 | 0.321 | 0.186 | 0.072 | 0.170 | 0.0952 | 0.0695 | 0.253 | 0.121 |
| AD-39829.1 | 0.283 | 0.133 | 0.353 | 0.266 | 0.1060 | 0.0611 | 0.208 | 0.310 |
| AD-39835.1 | 1.265 | 0.792 | 0.460 | 0.641 | 0.3343 | 0.1277 | 1.029 | 0.551 |
| AD-39841.1 | 0.345 | 0.267 | 0.416 | 0.369 | 0.0552 | 0.0335 | 0.306 | 0.392 |
| AD-39853.1 | 0.257 | 0.268 | 0.640 | 0.527 | 0.0081 | 0.0799 | 0.262 | 0.584 |
| AD-39859.1 | 0.316 | 0.290 | 0.773 | 0.886 | 0.0182 | 0.0801 | 0.303 | 0.830 |
| AD-39865.1 | 0.228 | 0.216 | 0.456 | 0.424 | 0.0084 | 0.0231 | 0.222 | 0.440 |
| AD-39871.1 | 0.218 | 0.338 | 0.502 | 0.571 | 0.0849 | 0.0489 | 0.278 | 0.537 |
| AD-39830.1 | 0.284 | 0.293 | 0.770 | 0.716 | 0.0063 | 0.0379 | 0.289 | 0.743 |
| AD-39836.1 | 0.267 | 0.232 | 0.615 | 0.580 | 0.0249 | 0.0254 | 0.250 | 0.598 |
| AD-39842.1 | 0.242 | 0.259 | 0.707 | 0.654 | 0.0121 | 0.0373 | 0.250 | 0.681 |
| AD-39848.1 | 0.515 | 0.591 | 1.071 | 1.012 | 0.0536 | 0.0416 | 0.553 | 1.042 |
| AD-39854.1 | 0.853 | 1.128 | 1.035 | 1.059 | 0.1943 | 0.0169 | 0.991 | 1.047 |
| AD-39860.1 | 0.969 | 1.119 | 0.965 | 0.833 | 0.1058 | 0.0936 | 1.044 | 0.899 |
| AD-39866.1 | 0.247 | 0.395 | 0.733 | 0.834 | 0.1045 | 0.0711 | 0.321 | 0.784 |
| AD-39992.1 | 0.507 | 0.837 | 0.985 | 0.990 | 0.2334 | 0.0032 | 0.672 | 0.988 |
| AD-39998.1 | 0.384 | 0.549 | 0.745 | 0.676 | 0.1167 | 0.0486 | 0.466 | 0.711 |
| AD-40004.1 | 0.509 | 0.664 | 1.090 | 1.042 | 0.1096 | 0.0340 | 0.587 | 1.066 |
| AD-40010.1 | 0.212 | 0.245 | 0.954 | 0.885 | 0.0232 | 0.0487 | 0.228 | 0.919 |
| AD-40016.1 | 0.261 | 0.514 | 0.731 | 1.050 | 0.1790 | 0.2254 | 0.387 | 0.891 |
| AD-40022.1 | 0.784 | 1.221 | 0.955 | 0.939 | 0.3089 | 0.0112 | 1.003 | 0.947 |
| AD-40028.1 | 0.907 | 1.194 | 1.062 | 0.976 | 0.2026 | 0.0608 | 1.050 | 1.019 |
| AD-40034.1 | 0.367 | 0.483 | 0.902 | 0.718 | 0.0819 | 0.1298 | 0.425 | 0.810 |
| AD-39999.1 | 0.227 | 0.339 | 0.910 | 0.837 | 0.0789 | 0.0511 | 0.283 | 0.873 |
| AD-40005.1 | 0.219 | 0.202 | 0.419 | 0.421 | 0.0121 | 0.0012 | 0.211 | 0.420 |
| AD-40011.1 | 0.470 | 0.529 | 0.731 | 0.637 | 0.0413 | 0.0663 | 0.499 | 0.684 |
| AD-40017.1 | 0.209 | 0.402 | 0.873 | 0.806 | 0.1364 | 0.0475 | 0.306 | 0.839 |
| AD-40029.1 | 0.793 | 0.821 | 0.904 | 0.834 | 0.0199 | 0.0496 | 0.807 | 0.869 |
| AD-39846.1 | 0.591 | 0.468 | 0.690 | 0.823 | 0.0867 | 0.0942 | 0.529 | 0.757 |
| AD-40035.1 | 0.872 | 1.166 | 1.079 | 1.090 | 0.2083 | 0.0081 | 1.019 | 1.085 |
| AD-39852.1 | 0.439 | 0.346 | 0.784 | 0.995 | 0.0659 | 0.1492 | 0.393 | 0.890 |
| AD-39994.1 | 0.396 | 0.517 | 0.936 | 1.097 | 0.0854 | 0.1137 | 0.457 | 1.016 |
| AD-40000.1 | 0.574 | 0.734 | 1.100 | 1.100 | 0.1133 | 0.0004 | 0.654 | 1.100 |
| AD-40006.1 | 0.402 | 0.389 | 0.831 | 0.800 | 0.0094 | 0.0223 | 0.395 | 0.815 |
| AD-40012.1 | 0.211 | 0.435 | 0.704 | 0.929 | 0.1588 | 0.1593 | 0.323 | 0.816 |
| AD-40018.1 | 0.692 | 1.163 | 0.808 | 0.933 | 0.3325 | 0.0883 | 0.928 | 0.871 |
| AD-40024.1 | 0.182 | 0.428 | 0.772 | 0.716 | 0.1739 | 0.0399 | 0.305 | 0.744 |
| AD-40030.1 | 0.437 | 0.651 | 0.825 | 0.874 | 0.1516 | 0.0344 | 0.544 | 0.849 |
| AD-40036.1 | 0.092 | 0.216 | 0.452 | 0.532 | 0.0876 | 0.0567 | 0.154 | 0.492 |
| AD-39995.1 | 0.290 | 0.686 | 0.918 | 0.618 | 0.2803 | 0.2122 | 0.488 | 0.768 |
| AD-40001.1 | 0.672 | 0.758 | 0.709 | 1.090 | 0.0607 | 0.2698 | 0.715 | 0.899 |
| AD-40007.1 | 0.785 | 0.477 | 0.780 | 0.928 | 0.2177 | 0.1048 | 0.631 | 0.854 |
| AD-40013.1 | 0.503 | 0.901 | 0.782 | 1.056 | 0.2814 | 0.1936 | 0.702 | 0.919 |
| AD-40019.1 | 0.264 | 0.125 | 0.615 | 0.731 | 0.0979 | 0.0818 | 0.194 | 0.673 |
| AD-40025.1 | 0.864 | 1.208 | 0.968 | 1.047 | 0.2430 | 0.0562 | 1.036 | 1.007 |
| AD-40031.1 | 0.268 | 0.286 | 0.995 | 0.805 | 0.0124 | 0.1344 | 0.277 | 0.900 |
| AD-40037.1 | 0.579 | 0.647 | 0.689 | 1.211 | 0.0484 | 0.3693 | 0.613 | 0.950 |
| AD-39996.1 | 0.338 | 0.400 | 0.618 | 0.680 | 0.0438 | 0.0442 | 0.369 | 0.649 |
| AD-40002.1 | 0.993 | 0.812 | 0.746 | 0.851 | 0.1281 | 0.0747 | 0.903 | 0.798 |
| AD-40008.1 | 0.227 | 0.154 | 0.309 | 0.434 | 0.0516 | 0.0879 | 0.190 | 0.372 |
| AD-40014.1 | 0.612 | 0.631 | 0.702 | 0.613 | 0.0136 | 0.0630 | 0.622 | 0.658 |
| AD-40020.1 | 0.386 | 0.409 | 0.962 | 1.008 | 0.0164 | 0.0324 | 0.398 | 0.985 |
| AD-40026.1 | 0.229 | 0.130 | 0.370 | 0.498 | 0.0702 | 0.0901 | 0.180 | 0.434 |
| AD-40032.1 | 0.421 | 0.454 | 0.979 | 0.954 | 0.0232 | 0.0176 | 0.437 | 0.966 |
| AD-40038.1 | 0.491 | 0.674 | 0.851 | 1.008 | 0.1291 | 0.1106 | 0.582 | 0.930 |
| AD-39997.1 | 0.644 | 0.860 | 0.749 | 0.878 | 0.1531 | 0.0917 | 0.752 | 0.814 |
| AD-39858.1 | 0.146 | 0.293 | 0.681 | 0.569 | 0.1043 | 0.0792 | 0.219 | 0.625 |
| AD-40009.1 | 0.191 | 0.382 | 0.912 | 1.055 | 0.1351 | 0.1012 | 0.287 | 0.984 |
| AD-40015.1 | 0.897 | 0.856 | 0.778 | 1.065 | 0.0292 | 0.2034 | 0.876 | 0.922 |
| AD-40021.1 | 0.225 | 0.282 | 0.850 | 0.658 | 0.0401 | 0.1358 | 0.254 | 0.754 |
| AD-40027.1 | 0.466 | 1.083 | 0.916 | 0.854 | 0.4358 | 0.0437 | 0.774 | 0.885 |
| AD-40033.1 | 0.278 | 0.311 | 0.426 | 0.588 | 0.0230 | 0.1150 | 0.295 | 0.507 |
| AD-40039.1 | 0.257 | 0.447 | 0.666 | 0.739 | 0.1348 | 0.0511 | 0.352 | 0.703 |
| AD-40045.1 | 0.263 | 0.147 | 0.526 | 0.945 | 0.0821 | 0.2962 | 0.205 | 0.735 |
| AD-40051.1 | 0.162 | 0.126 | 0.665 | 0.837 | 0.0255 | 0.1209 | 0.144 | 0.751 |
| AD-40057.1 | 0.150 | 0.176 | 0.641 | 0.791 | 0.0178 | 0.1066 | 0.163 | 0.716 |
| AD-40063.1 | 0.220 | 0.287 | 0.650 | 0.977 | 0.0468 | 0.2311 | 0.253 | 0.813 |
| AD-40069.1 | 0.431 | 0.559 | 0.729 | 0.922 | 0.0907 | 0.1363 | 0.495 | 0.825 |
| AD-40075.1 | 0.399 | 0.613 | 0.834 | 0.972 | 0.1511 | 0.0971 | 0.506 | 0.903 |
| AD-40081.1 | 0.287 | 0.351 | 0.499 | 0.612 | 0.0453 | 0.0795 | 0.319 | 0.556 |
| AD-40040.1 | 0.861 | 0.850 | 0.888 | 1.077 | 0.0077 | 0.1337 | 0.856 | 0.983 |
| AD-40046.1 | 0.386 | 0.397 | 0.607 | 0.634 | 0.0083 | 0.0191 | 0.392 | 0.621 |
| AD-39864.1 | 0.930 | 0.933 | 0.810 | 1.018 | 0.0022 | 0.1468 | 0.931 | 0.914 |
| AD-40052.1 | 0.272 | 0.216 | 0.526 | 0.852 | 0.0396 | 0.2299 | 0.244 | 0.689 |
| AD-40058.1 | 0.398 | 0.305 | 0.928 | 1.079 | 0.0655 | 0.1071 | 0.351 | 1.003 |
| AD-40064.1 | 0.460 | 0.208 | 0.909 | 1.083 | 0.1777 | 0.1230 | 0.334 | 0.996 |
| AD-40070.1 | 0.116 | 0.454 | 0.447 | 0.885 | 0.2390 | 0.3095 | 0.285 | 0.666 |
| AD-40076.1 | 0.396 | 1.498 | 0.634 | 1.054 | 0.7792 | 0.2969 | 0.947 | 0.844 |
| AD-40082.1 | 0.584 | 0.553 | 0.760 | 1.053 | 0.0218 | 0.2073 | 0.569 | 0.906 |
| AD-40041.1 | 0.196 | 0.241 | 0.862 | 0.978 | 0.0322 | 0.0819 | 0.218 | 0.920 |
| AD-40047.1 | 0.289 | 0.214 | 0.699 | 1.096 | 0.0535 | 0.2806 | 0.251 | 0.897 |
| AD-40053.1 | 0.973 | 1.094 | 0.717 | 1.079 | 0.0854 | 0.2560 | 1.033 | 0.898 |
| AD-40059.1 | 1.064 | 0.985 | 0.720 | 1.088 | 0.0562 | 0.2601 | 1.025 | 0.904 |
| AD-40065.1 | 0.855 | 0.863 | 0.589 | 1.020 | 0.0057 | 0.3048 | 0.859 | 0.805 |
| AD-40071.1 | 0.242 | 0.346 | 0.846 | 0.826 | 0.0739 | 0.0142 | 0.294 | 0.836 |
| AD-40077.1 | 0.249 | 0.187 | 0.649 | 0.738 | 0.0437 | 0.0633 | 0.218 | 0.693 |
| AD-40083.1 | 0.286 | 0.339 | 0.807 | 1.130 | 0.0373 | 0.2279 | 0.312 | 0.968 |
| AD-40042.1 | 0.549 | 0.288 | 1.205 | 1.288 | 0.1845 | 0.0587 | 0.418 | 1.246 |
| AD-40048.1 | 0.413 | 0.345 | 0.713 | 0.940 | 0.0483 | 0.1610 | 0.379 | 0.826 |
| AD-40054.1 | 0.278 | 0.258 | 0.685 | 0.825 | 0.0146 | 0.0989 | 0.268 | 0.755 |
| AD-40060.1 | 0.288 | 0.230 | 0.781 | 0.811 | 0.0410 | 0.0217 | 0.259 | 0.796 |
| AD-40066.1 | 0.779 | 0.829 | 0.950 | 1.284 | 0.0357 | 0.2361 | 0.804 | 1.117 |
| AD-40072.1 | 0.273 | 0.169 | 0.579 | 0.963 | 0.0738 | 0.2716 | 0.221 | 0.771 |
| AD-40078.1 | 0.747 | 0.841 | 1.177 | 1.410 | 0.0666 | 0.1645 | 0.794 | 1.294 |
| AD-40084.1 | 1.064 | 0.972 | 0.944 | 1.036 | 0.0647 | 0.0651 | 1.018 | 0.990 |
| AD-40043.1 | 0.340 | 0.313 | 0.804 | 0.795 | 0.0190 | 0.0065 | 0.327 | 0.800 |
| AD-40049.1 | 0.179 | 0.159 | 0.339 | 0.312 | 0.0141 | 0.0191 | 0.169 | 0.326 |
| AD-40055.1 | 0.243 | 0.248 | 0.811 | 0.817 | 0.0034 | 0.0044 | 0.245 | 0.814 |
| AD-40061.1 | 0.153 | 0.229 | 0.357 | 0.519 | 0.0537 | 0.1146 | 0.191 | 0.438 |
| AD-40067.1 | 0.260 | 0.141 | 0.715 | 0.692 | 0.0837 | 0.0156 | 0.201 | 0.703 |
| AD-40073.1 | 0.241 | 0.156 | 0.833 | 0.858 | 0.0597 | 0.0180 | 0.199 | 0.846 |
| AD-40079.1 | 0.236 | 0.236 | 0.694 | 0.991 | 0.0002 | 0.2099 | 0.236 | 0.842 |
| AD-40085.1 | 0.188 | 0.210 | 0.558 | 0.519 | 0.0155 | 0.0276 | 0.199 | 0.539 |
| AD-40044.1 | 0.229 | 0.126 | 0.342 | 0.506 | 0.0728 | 0.1157 | 0.178 | 0.424 |
| AD-40050.1 | 1.016 | 0.566 | 0.933 | 1.088 | 0.3183 | 0.1097 | 0.791 | 1.011 |
| AD-40056.1 | 0.274 | 0.244 | 0.801 | 1.155 | 0.0215 | 0.2506 | 0.259 | 0.978 |
| AD-40062.1 | 0.536 | 0.653 | 0.900 | 1.143 | 0.0822 | 0.1719 | 0.595 | 1.022 |
| AD-40068.1 | 0.175 | 0.131 | 0.218 | 0.438 | 0.0313 | 0.1551 | 0.153 | 0.328 |
| AD-40074.1 | 0.366 | 0.462 | 0.911 | 0.734 | 0.0674 | 0.1256 | 0.414 | 0.823 |
| AD-40080.1 | 0.273 | 0.296 | 0.844 | 0.932 | 0.0166 | 0.0623 | 0.284 | 0.888 |
| AD-40071.1 | 0.341 | 0.214 | 0.691 | 0.912 | 0.0902 | 0.1562 | 0.277 | 0.801 |
| AD-40077.1 | 0.192 | 0.180 | 0.483 | 0.404 | 0.0083 | 0.0563 | 0.186 | 0.444 |
| AD-40083.1 | 0.145 | 0.238 | 0.514 | 0.872 | 0.0657 | 0.2536 | 0.192 | 0.693 |
| AD-40042.1 | 0.403 | 0.288 | 0.626 | 0.747 | 0.0814 | 0.0856 | 0.346 | 0.686 |
| AD-35523.3 | 0.228 | 0.350 | 1.165 | 1.104 | 0.0862 | 0.0434 | 0.289 | 1.135 |
| AD-35529.1 | 0.367 | 0.368 | 1.099 | 0.831 | 0.0004 | 0.1893 | 0.368 | 0.965 |
| AD-35535.4 | 0.466 | 0.362 | 0.563 | 0.600 | 0.0735 | 0.0264 | 0.414 | 0.582 |
| AD-35541.4 | 0.585 | 0.358 | 1.003 | 0.713 | 0.1606 | 0.2052 | 0.472 | 0.858 |
| AD-35547.4 | 0.491 | 0.546 | 0.732 | 0.626 | 0.0393 | 0.0753 | 0.518 | 0.679 |
| AD-35553.4 | 0.785 | 0.690 | 1.043 | 0.744 | 0.0677 | 0.2115 | 0.738 | 0.893 |
| AD-35559.4 | 0.387 | 0.437 | 0.779 | 0.776 | 0.0357 | 0.0021 | 0.412 | 0.778 |
| AD-35565.4 | 0.549 | 0.568 | 0.930 | 1.163 | 0.0132 | 0.1647 | 0.559 | 1.046 |
| AD-35524.4 | 0.358 | 0.399 | 0.997 | 0.915 | 0.0289 | 0.0576 | 0.379 | 0.956 |
| AD-35530.4 | 0.212 | 0.406 | 1.129 | 0.981 | 0.1374 | 0.1046 | 0.309 | 1.055 |
| AD-35536.4 | 0.463 | 0.272 | 1.028 | 1.131 | 0.1352 | 0.0727 | 0.368 | 1.080 |
| AD-35542.4 | 0.573 | 0.537 | 0.804 | 0.919 | 0.0255 | 0.0808 | 0.555 | 0.861 |
| AD-35548.4 | 0.944 | 0.574 | 0.886 | 0.728 | 0.2619 | 0.1113 | 0.759 | 0.807 |
| AD-35554.4 | 0.490 | 0.393 | 1.021 | 0.679 | 0.0682 | 0.2416 | 0.442 | 0.850 |
| AD-35560.2 | 1.199 | 0.386 | 0.796 | 0.610 | 0.5748 | 0.1310 | 0.793 | 0.703 |
| AD-35566.4 | 1.082 | 0.981 | 0.747 | 0.840 | 0.0714 | 0.0652 | 1.031 | 0.794 |
| AD-35525.2 | 0.645 | 0.767 | 0.956 | 0.627 | 0.0864 | 0.2323 | 0.706 | 0.792 |
| AD-35531.4 | 0.425 | 0.328 | 0.755 | 0.776 | 0.0683 | 0.0144 | 0.376 | 0.765 |
| AD-35537.4 | 0.824 | 0.823 | 0.710 | 0.628 | 0.0004 | 0.0578 | 0.824 | 0.669 |
| AD-35543.2 | 0.232 | 0.367 | 0.980 | 0.845 | 0.0954 | 0.0949 | 0.300 | 0.912 |
| AD-35549.4 | 1.492 | 0.378 | 1.057 | 0.665 | 0.7877 | 0.2769 | 0.935 | 0.861 |
| AD-35555.4 | 0.382 | 0.460 | 1.133 | 1.096 | 0.0554 | 0.0260 | 0.421 | 1.115 |
| AD-35561.4 | 1.037 | 0.685 | 1.036 | 0.854 | 0.2488 | 0.1285 | 0.861 | 0.945 |
| AD-35567.4 | 1.437 | 0.698 | 1.098 | 0.909 | 0.5222 | 0.1337 | 1.068 | 1.004 |
| AD-35526.4 | 1.354 | 0.995 | 0.597 | 0.754 | 0.2540 | 0.1111 | 1.174 | 0.675 |
| AD-35532.4 | 0.645 | 0.312 | 1.117 | 0.944 | 0.2357 | 0.1222 | 0.479 | 1.031 |
| AD-35535.4 | 0.694 | 0.362 | 0.856 | 1.093 | 0.2353 | 0.1672 | 0.528 | 0.974 |
| AD-35538.4 | 0.280 | 0.358 | 1.121 | 0.733 | 0.0551 | 0.2744 | 0.319 | 0.927 |
| AD-35544.4 | 1.562 | 0.806 | 0.895 | 1.104 | 0.5351 | 0.1477 | 1.184 | 1.000 |
| AD-35550.4 | 0.988 | 0.683 | 0.745 | 1.159 | 0.2155 | 0.2926 | 0.836 | 0.952 |
| AD-35556.4 | 0.597 | 0.298 | 1.087 | 0.890 | 0.2119 | 0.1388 | 0.448 | 0.989 |
| AD-35562.4 | 0.412 | 0.652 | 0.796 | 0.857 | 0.1700 | 0.0436 | 0.532 | 0.826 |
| AD-35568.4 | 0.324 | 0.544 | 0.986 | 1.171 | 0.1556 | 0.1304 | 0.434 | 1.079 |
| AD-35527.4 | 0.218 | 0.272 | 1.079 | 1.097 | 0.0380 | 0.0122 | 0.245 | 1.088 |
| AD-35533.4 | 0.488 | 0.226 | 1.236 | 1.089 | 0.1848 | 0.1038 | 0.357 | 1.162 |
| AD-35539.4 | 0.821 | 0.660 | 1.065 | 1.155 | 0.1140 | 0.0637 | 0.740 | 1.110 |
| AD-35545.4 | 1.206 | 0.787 | 0.990 | 1.097 | 0.2968 | 0.0755 | 0.997 | 1.043 |
| AD-35551.4 | 0.860 | 0.404 | 1.011 | 1.078 | 0.3220 | 0.0473 | 0.632 | 1.044 |
| AD-35563.4 | 1.183 | 0.977 | 0.908 | 1.277 | 0.1461 | 0.2606 | 1.080 | 1.092 |
| AD-35528.4 | 0.955 | 0.770 | 1.094 | 0.757 | 0.1309 | 0.2387 | 0.863 | 0.926 |
| AD-35540.4 | 0.560 | 0.541 | 1.061 | 1.052 | 0.0132 | 0.0065 | 0.550 | 1.056 |
| AD-35546.4 | 0.716 | 0.605 | 1.121 | 0.996 | 0.0789 | 0.0886 | 0.660 | 1.058 |
| AD-35541.4 | 0.847 | 0.358 | 1.046 | 1.002 | 0.3458 | 0.0314 | 0.603 | 1.024 |
| AD-35552.4 | 0.468 | 0.529 | 1.057 | 1.002 | 0.0431 | 0.0391 | 0.499 | 1.029 |
| AD-35558.4 | 0.424 | 0.342 | 1.241 | 1.045 | 0.0578 | 0.1385 | 0.383 | 1.143 |
| AD-35564.4 | 0.485 | 0.438 | 0.980 | 0.968 | 0.0329 | 0.0085 | 0.461 | 0.974 |
| AD-35570.4 | 0.579 | 0.413 | 0.839 | 1.108 | 0.1175 | 0.1900 | 0.496 | 0.973 |
| AD-35571.4 | 0.476 | 0.348 | 0.818 | 0.951 | 0.0907 | 0.0943 | 0.412 | 0.885 |
| AD-35577.4 | 0.300 | 0.393 | 0.844 | 0.882 | 0.0660 | 0.0267 | 0.347 | 0.863 |
| AD-35583.4 | 1.305 | 0.679 | 0.970 | 1.085 | 0.4424 | 0.0813 | 0.992 | 1.027 |
| AD-35589.4 | 1.799 | 1.425 | 1.223 | 1.155 | 0.2646 | 0.0480 | 1.612 | 1.189 |
| AD-35595.4 | 0.504 | 0.417 | 0.976 | 1.013 | 0.0619 | 0.0261 | 0.461 | 0.995 |
| AD-35601.4 | 0.834 | 0.338 | 1.076 | 0.938 | 0.3513 | 0.0973 | 0.586 | 1.007 |
| AD-35607.4 | 0.597 | 0.419 | 1.000 | 1.074 | 0.1256 | 0.0523 | 0.508 | 1.037 |

SD = standard deviation,
AVG = average

TABLE 6
IC50 data: KRAS fold change values.

| Duplex | IC50_bio1 | IC50_bio2 | AvgIC50 | SD |
|---|---|---|---|---|
| AD-39731.1 | 0.020 | 0.003 | 0.012 | 0.0122 |
| AD-39706.1 | 0.004 | 0.000 | 0.002 | 0.0028 |
| AD-39720.1 | 0.012 | 0.002 | 0.007 | 0.0070 |
| AD-39741.1 | 0.002 | 0.000 | 0.001 | 0.0015 |
| AD-39738.1 | 0.002 | 0.001 | 0.002 | 0.0008 |
| AD-39870.1 | 0.159 | 0.069 | 0.114 | 0.0636 |
| AD-39845.1 | 0.056 | 0.015 | 0.036 | 0.0294 |
| AD-39829.1 | 0.133 | 0.027 | 0.080 | 0.0750 |
| AD-39778.1 | 0.135 | 0.040 | 0.088 | 0.0670 |
| AD-39865.1 | 0.179 | 0.038 | 0.109 | 0.0996 |
| AD-39793.1 | 0.003 | 0.078 | 0.041 | 0.0526 |
| AD-39785.1 | 0.004 | 0.014 | 0.009 | 0.0068 |
| AD-40068.1 | 0.010 | 0.002 | 0.006 | 0.0052 |
| AD-40008.1 | 0.041 | 0.011 | 0.026 | 0.0217 |
| AD-40026.1 | 0.014 | 0.009 | 0.012 | 0.0036 |
| AD-40061.1 | 0.014 | 0.004 | 0.009 | 0.0068 |
| AD-40036.1 | 0.040 | 0.013 | 0.027 | 0.0196 |
| AD-40057.1 | 0.030 | 0.111 | 0.071 | 0.0577 |
| AD-35581.4 | 0.017 | 0.027 | 0.022 | 0.0071 |
| AD-35616.4 | 0.032 | 0.044 | 0.038 | 0.0091 |
| AD-35588.4 | 0.036 | 0.060 | 0.048 | 0.0164 |
| AD-35604.4 | 0.088 | 0.373 | 0.231 | 0.2015 |
| AD-35592.4 | 0.086 | 0.266 | 0.176 | 0.1270 |
| AD-35685.1 | 0.036 | 0.019 | 0.027 | 0.0120 |
| AD-38159.1 | 0.093 | 0.096 | 0.095 | 0.0027 |
| AD-38139.1 | 0.092 | 0.354 | 0.223 | 0.1849 |
| AD-38172.1 | 0.130 | 0.180 | 0.155 | 0.0352 |
| AD-38134.1 | 0.120 | 0.199 | 0.159 | 0.0557 |
| AD-38161.1 | 0.109 | 0.173 | 0.141 | 0.0448 |
| AD-38131.1 | 0.134 | 0.374 | 0.254 | 0.1699 |
| AD-38128.1 | 0.014 | 0.070 | 0.042 | 0.0394 |
| AD-38151.1 | 0.093 | 0.315 | 0.204 | 0.1571 |
| AD-38127.1 | 0.064 | 0.089 | 0.077 | 0.0177 |
| AD-38154.1 | 0.041 | 0.284 | 0.163 | 0.1721 |
| AD-38133.1 | 0.036 | 0.203 | 0.120 | 0.1182 |
| AD-38170.1 | 0.140 | 0.332 | 0.236 | 0.1352 |
| AD-38167.1 | 0.247 | 0.262 | 0.255 | 0.0104 |
| AD-39735.1 | 0.060 | 0.034 | 0.047 | 0.0186 |
| AD-39858.1 | 0.040 | 0.037 | 0.039 | 0.0016 |
| AD-39781.1 | 0.009 | 0.016 | 0.013 | 0.0043 |
| AD-39841.1 | 0.420 | 0.242 | 0.331 | 0.1255 |
| AD-39805.1 | 0.057 | 0.073 | 0.065 | 0.0114 |
| AD-39869.1 | 0.182 | 0.142 | 0.162 | 0.0281 |
| AD-39790.1 | 0.143 | 0.059 | 0.101 | 0.0595 |
| AD-40044.1 | 0.019 | 0.057 | 0.038 | 0.0265 |
| AD-40049.1 | 0.017 | 0.039 | 0.028 | 0.0154 |
| AD-40005.1 | 0.013 | 0.066 | 0.039 | 0.0372 |
| AD-40077.1 | 0.049 | 0.241 | 0.145 | 0.1358 |
| AD-40085.1 | 0.039 | 0.488 | 0.264 | 0.3173 |
| AD-40019.1 | 0.103 | 0.340 | 0.222 | 0.1677 |
| AD-40083.1 | 0.108 | 0.426 | 0.267 | 0.2253 |
| AD-35609.4 | 0.055 | 0.055 | 0.055 | 0.0001 |
| AD-35679.1 | 0.113 | 0.209 | 0.161 | 0.0673 |
| AD-35600.1 | 0.046 | 0.027 | 0.037 | 0.0134 |
| AD-35606.1 | 0.045 | 0.043 | 0.044 | 0.0018 |
| AD-38136.1 | 0.035 | 0.043 | 0.039 | 0.0061 |
| AD-38163.1 | 0.019 | 0.016 | 0.018 | 0.0017 |
| AD-38155.1 | 0.236 | 0.220 | 0.228 | 0.0118 |
| AD-38145.1 | 0.111 | 0.230 | 0.171 | 0.0842 |
| AD-38138.1 | 0.260 | 0.675 | 0.468 | 0.2933 |

Bio1: biological replicates 1 and 2; residual mRNA level relative to control.
SD = standard deviation, Avg = average

TABLE 6.1
Efficacy of particular KRAS siRNAs.
Various KRAS siRNAs were tested for efficacy in RKO cells in vitro.
Results are provided in Table 6.1, below. Provided are the residual
gene activity at 10 nM (Column 2) and 0.1 nM (Column 3). For
example, for AD-39720.1, there was a residual gene activity of 0.2,
or 20% (indicating 80% gene knockdown) at 10 nM, and 0.55 or 55%
(45% gene knockdown) at 0.1 nM. IC50 of knockdown in nM in
MiaPaca 2 cells is also provided.

| | | | knockdown |
|---|---|---|---|
| K-RAS siRNA | 10 nM RK0 | 0.1 nM RKO | IC50 MiaPaca 2 |
| AD-35600.1 | 0.3 | 0.27 | 0.0934 |
| AD-35609.4 | 0.17 | 0.41 | 0.037049 |
| AD-38136.1 | 0.07 | 0.14 | 0.0346 |
| AD-38159.1 | 0.14 | 0.22 | 0.01861 |
| AD-38163.1 | 0.09 | 0.16 | 0.0383 |
| AD-39720.1 | 0.2 | 0.55 | 0.005496 |
| AD-39735.1 | 0.21 | 0.37 | 0.0473 |
| AD-39741.1 | 0.18 | 0.67 | 0.0394 |
| AD-39760.1 | | | 0.0806 |
| AD-39778.1 | 0.23 | 0.43 | 0.040545 |
| AD-39822.1 | | | 1.3242 |
| AD-39845.1 | 0.2 | 0.3 | 0.020622 |
| AD-39870.1 | 0.25 | 0.12 | 0.026542 |
| AD-40008.1 | 0.19 | 0.37 | 0.033536 |
| AD-40021.1 | | | 0.1217 |
| AD-40061.1 | 0.19 | 0.44 | 0.009348 |
| AD-40068.1 | 0.15 | 0.33 | 0.009477 |
| AD-40072.1 | | | 0.2838 |

TABLE 6.2. Efficacy of particular KRAS siRNAs. Table 6.2, below, provides additional data pertaining to activity of particular KRAS siRNAs. The generic target sequence is provided. Proliferation was tested in vitro in MiaPaca2 cells, which are KRAS mutant and are therefore K-RAS dependent. IC50 was studied, using test concentrations from 0 to 10 nM. IC50 data are provided. For example, in the first row, siRNA AD-39822.1 has an 050 of 1.3242 nM.

[3554] Proliferation was tested in both BXPC3 and NCIH28 cells, which are both Wild type for KRAS and are therefore KRAS independent. 50 was studied, using test concentrations of 0 to 10 nM. In these studies, >10 nM NA50 indicates that the efficacy of KRAS siRNAs was specific to KRAS (little or no substantial off-target effects).

| | | | | Pro- | Pro- | |
|---|---|---|---|---|---|---|
| | | | SEQ ID | lifertation | lifertation | IC50 |
| AlnyID | Nicknames | Guide 19 mer generic | NO: | BXPC3 | NClH28 | MiaPaca2 |
| AD-35600.1 | NA | TCTCTATAATGGTGAATAT | 2742 | >10 | >10 | 0.0934 |
| AD-35609.4 | NA | AAATACACAAAGAAAGCCC | 2743 | >10 | >10 | 0.037049395 |
| AD-38136.1 | NA | TTTATTTCCTACTAGGACC | 2744 | >10 | >10 | 0.0346 |
| AD-38159.1 | hs KRAS 528 | TTTCCTACTAGGACCATAG | 2745 | >10 | >10 | 0.01861 |
| | A22S26 | | | | | |
| AD-38163.1 | NA | TTTAATTTGTTCTCTATAA | 2746 | >10 | >10 | 0.0383 |
| AD-39720.1 | NA | AGCTCCAACTACCACAAGT | 2747 | >10 | >10 | 0.005495521 |
| AD-39735.1 | hs KRAS 321 | TCAATTACTACTTGCTTCC | 2748 | >10 | >10 | 0.0473 |
| | A22S26 | | | | | |
| AD-39741.1 | hs KRAS 322 | ATCAATTACTACTTGCTTC | 2749 | >10 | >10 | 0.0394 |
| | A22S26 | | | | | |
| AD-39760.1 | NA | ATTAGCTGTATCGTCAAGG | 2750 | >10 | >10 | 0.0806 |
| AD-39778.1 | NA | TTCTCCATCAATTACTACT | 2751 | >10 | >10 | 0.040544532 |
| AD-39822.1 | NA | TCGAGAATATCCAAGAGAC | 2752 | >10 | >10 | 1.3242 |
| AD-39845.1 | NA | GATTTAGTATTATTTATGG | 2753 | >10 | >10 | 0.020622331 |
| AD-39870.1 | NA | ATATCTTCAAATGATTTAG | 2754 | >10 | >10 | 0.026542015 |
| AD-40008.1 | NA | TCTAGAAGGCAAATCACAT | 2755 | >10 | >10 | 0.033536261 |
| AD-40021.1 | NA | TGTCTACTGTTCTAGAAGG | 2756 | >10 | >10 | 0.1217 |
| AD-40061.1 | NA | AATTCCATAACTTCTTGCT | 2757 | >10 | >10 | 0.00934829 |
| AD-40068.1 | NA | AATAAAAGGAATTCCATAA | 2758 | >10 | >10 | 0.009476662 |
| AD-40072.1 | NA | ATAACTTCTTGCTAAGTCC | 2759 | >10 | >10 | 0.2838 |

### EQUIVALENTS

[3555] A composition of embodiment 1 is a composition comprising a RNAi agent comprising a sense strand and an antisense strand, wherein the antisense strand comprises at least 15 contiguous nucleotides differing by 0, 1, 2, or 3 nucleotides from the antisense strand of a RNAi agent specific to KRAS provided in Table 1.

[3556] The composition of embodiment 1, wherein the composition further comprises a second RNAi agent to KRAS.

[3557] The composition of embodiment 1, wherein the antisense strand is 30 or fewer nucleotides in length.

[3558] The composition of embodiment 1, wherein the sense strand and the antisense strand form a duplex region 15 to 30 nucleotide pairs in length.

[3559] The composition of embodiment 1, wherein the antisense strand and the sense strand are independently 19 to 23 nucleotides in length.

[3560] The composition of embodiment 1, wherein the RNAi agent comprises a modification that causes the RNAi agent to have increased stability in a biological sample or environment.

[3561] The composition of embodiment 1, wherein the RNAi agent comprises at least one modified backbone and/or at least one 2′-modified nucleotide.

[3562] The composition of embodiment 1, wherein the RNAi agent comprises:
[3563] a) at least one 5′-uridine-adenine-3′ (5′-ua-3′) dinucleotide, wherein the uridine is a 2′-modified nucleotide; and/or
[3564] b) at least one 5′-uridine-guanine-3′ (5′-ug-3′) dinucleotide, wherein the 5′-uridine is a 2′-modified nucleotide; and/or
[3565] c) at least one 5′-cytidine-adenine-3′ (5′-ca-3′) dinucleotide, wherein the 5′-cytidine is a 2′-modified nucleotide; and/or
[3566] d) at least one 5′-uridine-uridine-3′ (5′-uu-3′) dinucleotide, wherein the 5′-uridine is a 2′-modified nucleotide.

[3567] The composition of embodiment 1, wherein the RNAi agent comprises a 2′-modification selected from the group consisting of: 2′-deoxy, 2′-deoxy-2′-fluoro, 2′-O-methyl, 2′-O-methoxyethyl (2′-O-MOE), 2′-O-aminopropyl (2′-O-AP), 2′-O-dimethylaminoethyl (2′-O-DMAOE), 2′-O-dimethylaminopropyl (2′-O-DMAP), 2′-O-dimethylaminoethyloxyethyl (2′-O-DMAEOE), and 2′-O—N-methylacetamido (2′-O-NMA).

[3568] The composition of embodiment 1, wherein the RNAi agent comprises a blunt end.

[3569] The composition of embodiment 1, wherein the RNAi agent comprises an overhang having 1 to 4 unpaired nucleotides.

[3570] The composition of embodiment 1, wherein the RNAi agent comprises an overhang at the 3′-end of the antisense strand of the RNAi agent.

[3571] The composition of embodiment 1, wherein the RNAi agent is ligated to one or more agent selected from: one or more diagnostic compound, reporter group, cross-linking agent, nuclease-resistance conferring moiety, natural or unusual nucleobase, lipophilic molecule, cholesterol, lipid, lectin, steroid, uvaol, hecigenin, diosgenin, terpene, triterpene, sarsasapogenin, Friedelin, epifriedelanol-derivatized lithocholic acid, vitamin, carbohydrate, dextran, pullulan, chitin, chitosan, synthetic carbohydrate, oligo lactate 15-mer, natural polymer, low- or medium-molecular weight polymer, inulin, cyclodextrin, hyaluronic acid, protein, protein-binding agent, integrin-targeting molecule, polycationic, peptide, polyamine, peptide mimic, and/or transferrin.

[3572] The composition of embodiment 1, wherein the RNAi agent is capable of inhibiting expression of KRAS by at least about 60% at a concentration of 10 nM in RKO cells in vitro.

[3573] The composition of embodiment 1, wherein the RNAi agent is capable of inhibiting expression of KRAS by at least about 70% at a concentration of 10 nM in RKO cells in vitro.

[3574] The composition of embodiment 1, wherein the RNAi agent is capable of inhibiting expression of KRAS by at least about 80% at a concentration of 10 nM in RKO cells in vitro.

[3575] The composition of embodiment 1, wherein the RNAi agent is capable of inhibiting expression of KRAS by at least about 90% at a concentration of 10 nM in RKO cells in vitro.

[3576] The composition of embodiment 1, wherein the RNAi agent has an EC50 of no more than about 0.1 nM.

[3577] The composition of embodiment 1, wherein the RNAi agent has an EC50 of no more than about 0.01 nM.

[3578] The composition of embodiment 1, wherein the RNAi agent has an EC50 of no more than about 0.001 nM.

[3579] A composition of embodiment 2 comprising a RNAi agent comprising a first strand and a second strand, wherein the first strand and second strand comprise at least 15 contiguous nucleotides differing by 0, 1, 2, or 3 nucleotides from the first and second strand, respectively, of a RNAi agent specific to KRAS provided in Table 1.

[3580] The composition of embodiment 2, wherein the composition comprises a second RNAi agent to KRAS.

[3581] The composition of embodiment 2, wherein the second strand is 30 or fewer nucleotides in length.

[3582] The composition of embodiment 2, wherein the first strand and the second strand form a duplex region 15 to 30 nucleotide pairs in length.

[3583] The composition of embodiment 2, wherein the first strand and the second strand are independently 19 to 23 nucleotides in length.

[3584] The composition of embodiment 2, wherein the RNAi agent comprises a modification that causes the RNAi agent to have increased stability in a biological sample or environment.

[3585] The composition of embodiment 2, wherein the RNAi agent comprises a phosphorothioate and/or a 2′-modified nucleotide.

[3586] The composition of embodiment 2, wherein the RNAi agent comprises:
[3587] at least one 5′-uridine-adenine-3′ (5′-ua-3′) dinucleotide, wherein the uridine is a 2′-modified nucleotide; and/or at least one 5′-uridine-guanine-3′ (5′-ug-3′) dinucleotide, wherein the 5′-uridine is a 2′-modified nucleotide;
[3588] and/or at least one 5′-cytidine-adenine-3′ (5′-ca-3′) dinucleotide, wherein the 5′-cytidine is a 2′-modified nucleotide;
[3589] and/or at least one 5′-uridine-uridine-3′ (5′-uu-3′) dinucleotide, wherein the 5′-uridine is a 2′-modified nucleotide.

[3590] The composition of embodiment 2, wherein the RNAi agent comprises one or more 2′-modifications selected from the group consisting of: 2′-deoxy, 2′-deoxy-2′-fluoro, 2′-O-methyl, 2′-O-methoxyethyl (2′-O-MOE), 2′-O-aminopropyl (2′-O-AP), 2′-O-dimethylaminoethyl (2′-O-DMAOE), 2′-O-dimethylaminopropyl (2′-O-DMAP), 2′-O-dimethylaminoethyloxyethyl (2′-O-DMAEOE), and 2′-O—N-methylacetamido (2′-O-NMA).

[3591] The composition of embodiment 2, wherein the RNAi agent comprises a blunt end.

[3592] The composition of embodiment 2, wherein the RNAi agent comprises an overhang having 1 to 4 unpaired nucleotides.

[3593] The composition of embodiment 2, wherein the RNAi agent comprises an overhang at the 3′-end of the antisense strand.

[3594] The composition of embodiment 2, wherein the RNAi agent is ligated to one or more agents, the agent selected from a: one or more diagnostic compound, reporter group, cross-linking agent, nuclease-resistance conferring moiety, natural or unusual nucleobase, lipophilic molecule, cholesterol, lipid, lectin, steroid, uvaol, hecigenin, diosgenin, terpene, triterpene, sarsasapogenin, Friedelin, epifriedelanol-derivatized lithocholic acid, vitamin, carbohydrate, dextran, pullulan, chitin, chitosan, synthetic carbohydrate, oligo lactate 15-mer, natural polymer, low- or medium-molecular weight polymer, inulin, cyclodextrin, hyaluronic acid, protein, protein-binding agent, integrin-targeting molecule, polycationic, peptide, polyamine, peptide mimic, and/or transferrin.

[3595] The composition of embodiment 2, wherein the RNAi agent is capable of inhibiting expression of KRAS by at least about 60% at a concentration of 10 nM in RKO cells in vitro.

[3596] The composition of embodiment 2, wherein the RNAi agent is capable of inhibiting expression of KRAS by at least about 70% at a concentration of 10 nM in RKO cells in vitro.

[3597] The composition of embodiment 2, wherein the RNAi agent is capable of inhibiting expression of KRAS by at least about 80% at a concentration of 10 nM in RKO cells in vitro.

[3598] The composition of embodiment 2, wherein the RNAi agent is capable of inhibiting expression of KRAS by at least about 90% at a concentration of 10 nM in RKO cells in vitro.

[3599] The composition of embodiment 2, wherein the RNAi agent has an EC50 of no more than about 0.1 nM.

[3600] The composition of embodiment 2, wherein the RNAi agent has an EC50 of no more than about 0.01 nM in MiaPaca2 cells.

[3601] The composition of embodiment 2, wherein the RNAi agent has an EC50 of no more than about 0.001 nM in MiaPaca2 cells.

[3602] A method of embodiment 3 is a method comprising a method of treating a KRAS-related disease in an individual, comprising the step of administering to the individual a therapeutically effective amount of a composition comprising a RNAi agent comprising a sense strand and an antisense strand, wherein the antisense strand comprises at least 15 contiguous nucleotides differing by 0, 1, 2, or 3 nucleotides from the antisense strand of a RNAi agent specific to KRAS provided in Table 1.

[3603] The method of embodiment 3, wherein the KRAS-related disease is a proliferative disease, cardio-facio-cutaneous (CFC) syndrome or Noonan syndrome.

[3604] The method of embodiment 3, wherein the KRAS-related disease is a proliferative disease, cardio-facio-cutaneous (CFC) syndrome or Noonan syndrome.

[3605] The method of embodiment 3, wherein the method further comprises the step of administering an additional treatment for a proliferative disease, cardio-facio-cutaneous (CFC) syndrome or Noonan syndrome.

[3606] The method of embodiment 3, wherein the method further comprises the step of administering an additional treatment for a proliferative disease, including without limitation a solid or liquid cancer, adenocarcinoma, colorectal cancer, advanced and/or metastatic colorectal cancer, colon cancer, lung, non-small cell lung cancer and lung adenocarcinoma, acute myelogenous lung, bladder, brain, breast, cervical, endometrial, gastric, head and neck, kidney, leukemia, myelodysplastic syndrome, myeloid leukemia, liver, melanoma, ovarian, pancreatic, prostate, testicular, thyroid cancers, or cardio-facio-cutaneous (CFC) syndrome or Noonan syndrome.

[3607] The method of embodiment 3, wherein the composition comprises a second RNAi agent to KRAS.

[3608] The method of embodiment 3, wherein the method further comprises the step of administering an additional RNAi agent to KRAS.

[3609] The method of embodiment 3, further comprising the administration of an additional treatment.

[3610] The method of embodiment 3, wherein the additional treatment is a composition.

[3611] The method of embodiment 3, wherein the additional treatment is a method.

[3612] The method of embodiment 3, wherein the additional treatment and the RNAi agent can be administered in any order.

[3613] A method of embodiment 4 is a method comprising a method of inhibiting the expression of KRAS in an individual, comprising the step of administering to the individual a therapeutically effective amount of a composition comprising a RNAi agent comprising a sense strand and an antisense strand, wherein the antisense strand comprises at least 15 contiguous nucleotides differing by 0, 1, 2, or 3 nucleotides from the antisense strand of a RNAi agent specific to KRAS provided in Table 1.

[3614] The method of embodiment 4, wherein the individual is afflicted with or susceptible to a KRAS-related disease.

[3615] The method of embodiment 4, wherein the KRAS-related disease is a proliferative disease, cardio-facio-cutaneous (CFC) syndrome or Noonan syndrome.

[3616] The method of embodiment 4, wherein the KRAS-related disease is a proliferative disease.

[3617] The method of embodiment 4, wherein the KRAS-related disease is a proliferative disease, including without limitation a solid or liquid cancer, adenocarcinoma, colorectal cancer, advanced and/or metastatic colorectal cancer, colon cancer, lung, non-small cell lung cancer and lung adenocarcinoma, acute myelogenous lung, bladder, brain, breast, cervical, endometrial, gastric, head and neck, kidney, leukemia, myelodysplastic syndrome, myeloid leukemia, liver, melanoma, ovarian, pancreatic, prostate, testicular, thyroid cancers, or cardio-facio-cutaneous (CFC) syndrome or Noonan syndrome

[3618] The method of embodiment 4, further comprising the administration of an additional treatment.

[3619] The method of embodiment 4, wherein the additional treatment is a composition.

[3620] The method of embodiment 4, wherein the additional treatment is a method.

[3621] The method of embodiment 4, wherein the additional treatment and the RNAi agent can be administered in any order.

[3622] A composition of embodiment 5 is a composition comprising a medicament for use in an RNAi formulation comprising a RNAi agent comprising a sense strand and an antisense strand, wherein the antisense strand comprises at least 15 contiguous nucleotides differing by 0, 1, 2, or 3 nucleotides from the antisense strand of a RNAi agent specific to KRAS provided in Table 1.

[3623] Any composition above in a pharmaceutically effective formulation.

[3624] The composition according to embodiment 5, for use in a method of treating a KRAS-related disease in an individual, the method comprising the step of administering to the individual a therapeutically effective amount of a composition according to embodiment 1.

[3625] The use of a composition according to embodiment 5, in the manufacture of a medicament for the treatment of a KRAS-related disease.

[3626] The use of a composition according to embodiment 5, in the manufacture of a medicament for the treatment of a proliferative disease, including without limitation a solid or liquid cancer, adenocarcinoma, colorectal cancer, advanced and/or metastatic colorectal cancer, colon cancer, lung, non-small cell lung cancer and lung adenocarcinoma, acute myelogenous lung, bladder, brain, breast, cervical, endometrial, gastric, head and neck, kidney, leukemia, myelodysplastic syndrome, myeloid leukemia, liver, melanoma, ovarian, pancreatic, prostate, testicular, thyroid cancers, or cardio-facio-cutaneous (CFC) syndrome or Noonan syndrome.

[3627] The use of embodiment 5, wherein the KRAS-related disease is a proliferative disease, cardio-facio-cutaneous (CFC) syndrome or Noonan syndrome.

[3628] The composition of embodiment 1, wherein all the pyrimidines are 2′ O-methyl-modified nucleotides.

[3629] The composition of embodiment 1, wherein all the pyrimidines are 2′ O-methyl-modified nucleotides.

[3630] Unless defined otherwise, the technical and scientific terms used herein have the same meaning as that usually understood by a specialist familiar with the field to which the disclosure belongs.

[3631] Unless indicated otherwise, all methods, steps, techniques and manipulations that are not specifically described in detail can be performed and have been performed in a manner known per se, as will be clear to the skilled person. Reference is for example again made to the standard handbooks and the general background art mentioned herein and to the further references cited therein. Unless indicated otherwise, each of the references cited herein is incorporated in its entirety by reference.

[3632] Claims are non-limiting and are provided below.

[3633] Although particular embodiments and claims have been disclosed herein in detail, this has been done by way of example for purposes of illustration only, and is not intended to be limiting with respect to the scope of the appended claims, or the scope of subject matter of claims of any corresponding future application. In particular, it is contemplated by the inventors that various substitutions, alterations, and modifications may be made to the disclosure without departing from the spirit and scope of the disclosure as defined by the claims. The choice of nucleic acid starting material, clone of interest, or library type is believed to be a matter of routine for a person of ordinary skill in the art with knowledge of the embodiments described herein. Other aspects, advantages, and modifications considered to be within the scope of the following claims. Those skilled in the art will recognize or be able to ascertain, using no more than routine experimentation, many equivalents of the specific embodiments of the disclosure described herein. Such equivalents are intended to be encompassed by the following claims. Redrafting of claim scope in later filed corresponding applications may be due to limitations by the patent laws of various countries and should not be interpreted as giving up subject matter of the claims.

The application's sequence listing, which the Patent Office published only in electronic form, follows.

SEQUENCE LISTING (2835 sequences)

SEQ ID NO: 1 - RNA, 19 nt, synthetic construct
  source 1..19: mol_type = other RNA
ggacgaatatgatccaaca

SEQ ID NO: 2 - RNA, 19 nt, synthetic construct
  source 1..19: mol_type = other RNA
gacgaatatgatccaacaa

SEQ ID NO: 3 - RNA, 19 nt, synthetic construct
  source 1..19: mol_type = other RNA
acgaatatgatccaacaat

SEQ ID NO: 4 - RNA, 19 nt, synthetic construct
  source 1..19: mol_type = other RNA
cgaatatgatccaacaata

SEQ ID NO: 5 - RNA, 19 nt, synthetic construct
  source 1..19: mol_type = other RNA
gaatatgatccaacaatag

SEQ ID NO: 6 - RNA, 19 nt, synthetic construct
  source 1..19: mol_type = other RNA
aatatgatccaacaataga

SEQ ID NO: 7 - RNA, 19 nt, synthetic construct
  source 1..19: mol_type = other RNA
atatgatccaacaatagag

SEQ ID NO: 8 - RNA, 19 nt, synthetic construct
  source 1..19: mol_type = other RNA
tatgatccaacaatagagg

SEQ ID NO: 9 - RNA, 19 nt, synthetic construct
  source 1..19: mol_type = other RNA
atgatccaacaatagagga

SEQ ID NO: 10 - RNA, 19 nt, synthetic construct
  source 1..19: mol_type = other RNA
tgatccaacaatagaggat

SEQ ID NO: 11 - RNA, 19 nt, synthetic construct
  source 1..19: mol_type = other RNA
gatccaacaatagaggatt

SEQ ID NO: 12 - RNA, 19 nt, synthetic construct
  source 1..19: mol_type = other RNA
atccaacaatagaggattc

SEQ ID NO: 13 - RNA, 19 nt, synthetic construct
  source 1..19: mol_type = other RNA
tccaacaatagaggattcc

SEQ ID NO: 14 - RNA, 19 nt, synthetic construct
  source 1..19: mol_type = other RNA
ccaacaatagaggattcct

SEQ ID NO: 15 - RNA, 19 nt, synthetic construct
  source 1..19: mol_type = other RNA
caacaatagaggattccta

SEQ ID NO: 16 - RNA, 19 nt, synthetic construct
  source 1..19: mol_type = other RNA
aacaatagaggattcctac

SEQ ID NO: 17 - RNA, 19 nt, synthetic construct
  source 1..19: mol_type = other RNA
acaatagaggattcctaca

SEQ ID NO: 18 - RNA, 19 nt, synthetic construct
  source 1..19: mol_type = other RNA
caatagaggattcctacag

SEQ ID NO: 19 - RNA, 19 nt, synthetic construct
  source 1..19: mol_type = other RNA
aatagaggattcctacagg

SEQ ID NO: 20 - RNA, 19 nt, synthetic construct
  source 1..19: mol_type = other RNA
atagaggattcctacagga

SEQ ID NO: 21 - RNA, 19 nt, synthetic construct
  source 1..19: mol_type = other RNA
tagaggattcctacaggaa

SEQ ID NO: 22 - RNA, 19 nt, synthetic construct
  source 1..19: mol_type = other RNA
agaggattcctacaggaag

SEQ ID NO: 23 - RNA, 19 nt, synthetic construct
  source 1..19: mol_type = other RNA
gaggattcctacaggaagc

SEQ ID NO: 24 - RNA, 19 nt, synthetic construct
  source 1..19: mol_type = other RNA
aggattcctacaggaagca

SEQ ID NO: 25 - RNA, 19 nt, synthetic construct
  source 1..19: mol_type = other RNA
ggattcctacaggaagcaa

SEQ ID NO: 26 - RNA, 19 nt, synthetic construct
  source 1..19: mol_type = other RNA
gattcctacaggaagcaag

SEQ ID NO: 27 - RNA, 19 nt, synthetic construct
  source 1..19: mol_type = other RNA
attcctacaggaagcaagt

SEQ ID NO: 28 - RNA, 19 nt, synthetic construct
  source 1..19: mol_type = other RNA
ttcctacaggaagcaagta

SEQ ID NO: 29 - RNA, 19 nt, synthetic construct
  source 1..19: mol_type = other RNA
tcctacaggaagcaagtag

SEQ ID NO: 30 - RNA, 19 nt, synthetic construct
  source 1..19: mol_type = other RNA
cctacaggaagcaagtagt

SEQ ID NO: 31 - RNA, 19 nt, synthetic construct
  source 1..19: mol_type = other RNA
ctacaggaagcaagtagta

SEQ ID NO: 32 - RNA, 19 nt, synthetic construct
  source 1..19: mol_type = other RNA
tacaggaagcaagtagtaa

SEQ ID NO: 33 - RNA, 19 nt, synthetic construct
  source 1..19: mol_type = other RNA
acaggaagcaagtagtaat

SEQ ID NO: 34 - RNA, 19 nt, synthetic construct
  source 1..19: mol_type = other RNA
caggaagcaagtagtaatt

SEQ ID NO: 35 - RNA, 19 nt, synthetic construct
  source 1..19: mol_type = other RNA
ttggatattctcgacacag

SEQ ID NO: 36 - RNA, 19 nt, synthetic construct
  source 1..19: mol_type = other RNA
tggatattctcgacacagc

SEQ ID NO: 37 - RNA, 19 nt, synthetic construct
  source 1..19: mol_type = other RNA
ggatattctcgacacagca

SEQ ID NO: 38 - RNA, 19 nt, synthetic construct
  source 1..19: mol_type = other RNA
atattctcgacacagcagg

SEQ ID NO: 39 - RNA, 19 nt, synthetic construct
  source 1..19: mol_type = other RNA
attctcgacacagcaggtc

SEQ ID NO: 40 - RNA, 19 nt, synthetic construct
  source 1..19: mol_type = other RNA
tctcgacacagcaggtcaa

SEQ ID NO: 41 - RNA, 19 nt, synthetic construct
  source 1..19: mol_type = other RNA
ctcgacacagcaggtcaag

SEQ ID NO: 42 - RNA, 19 nt, synthetic construct
  source 1..19: mol_type = other RNA
tcgacacagcaggtcaaga

SEQ ID NO: 43 - RNA, 19 nt, synthetic construct
  source 1..19: mol_type = other RNA
cgacacagcaggtcaagag

SEQ ID NO: 44 - RNA, 19 nt, synthetic construct
  source 1..19: mol_type = other RNA
gacacagcaggtcaagagg

SEQ ID NO: 45 - RNA, 19 nt, synthetic construct
  source 1..19: mol_type = other RNA
acacagcaggtcaagagga

SEQ ID NO: 46 - RNA, 19 nt, synthetic construct
  source 1..19: mol_type = other RNA
cacagcaggtcaagaggag

SEQ ID NO: 47 - RNA, 19 nt, synthetic construct
  source 1..19: mol_type = other RNA
acagcaggtcaagaggagt

SEQ ID NO: 48 - RNA, 19 nt, synthetic construct
  source 1..19: mol_type = other RNA
cagcaggtcaagaggagta

SEQ ID NO: 49 - RNA, 19 nt, synthetic construct
  source 1..19: mol_type = other RNA
agcaggtcaagaggagtac

SEQ ID NO: 50 - RNA, 19 nt, synthetic construct
  source 1..19: mol_type = other RNA
gcaggtcaagaggagtaca

SEQ ID NO: 51 - RNA, 19 nt, synthetic construct
  source 1..19: mol_type = other RNA
caggtcaagaggagtacag

SEQ ID NO: 52 - RNA, 19 nt, synthetic construct
  source 1..19: mol_type = other RNA
aggtcaagaggagtacagt

SEQ ID NO: 53 - RNA, 19 nt, synthetic construct
  source 1..19: mol_type = other RNA
ggtcaagaggagtacagtg

SEQ ID NO: 54 - RNA, 19 nt, synthetic construct
  source 1..19: mol_type = other RNA
gtcaagaggagtacagtgc

SEQ ID NO: 55 - RNA, 19 nt, synthetic construct
  source 1..19: mol_type = other RNA
tcaagaggagtacagtgca

SEQ ID NO: 56 - RNA, 19 nt, synthetic construct
  source 1..19: mol_type = other RNA
caagaggagtacagtgcaa

SEQ ID NO: 57 - RNA, 19 nt, synthetic construct
  source 1..19: mol_type = other RNA
aagaggagtacagtgcaat

SEQ ID NO: 58 - RNA, 19 nt, synthetic construct
  source 1..19: mol_type = other RNA
agaggagtacagtgcaatg

SEQ ID NO: 59 - RNA, 19 nt, synthetic construct
  source 1..19: mol_type = other RNA
gaggagtacagtgcaatga

SEQ ID NO: 60 - RNA, 19 nt, synthetic construct
  source 1..19: mol_type = other RNA
aggagtacagtgcaatgag

SEQ ID NO: 61 - RNA, 19 nt, synthetic construct
  source 1..19: mol_type = other RNA
ggagtacagtgcaatgagg

SEQ ID NO: 62 - RNA, 19 nt, synthetic construct
  source 1..19: mol_type = other RNA
gagtacagtgcaatgaggg

SEQ ID NO: 63 - RNA, 19 nt, synthetic construct
  source 1..19: mol_type = other RNA
ggggagggctttctttgtg

SEQ ID NO: 64 - RNA, 19 nt, synthetic construct
  source 1..19: mol_type = other RNA
gggagggctttctttgtgt

SEQ ID NO: 65 - RNA, 19 nt, synthetic construct
  source 1..19: mol_type = other RNA
ggagggctttctttgtgta

SEQ ID NO: 66 - RNA, 19 nt, synthetic construct
  source 1..19: mol_type = other RNA
gagggctttctttgtgtat

SEQ ID NO: 67 - RNA, 19 nt, synthetic construct
  source 1..19: mol_type = other RNA
agggctttctttgtgtatt

SEQ ID NO: 68 - RNA, 19 nt, synthetic construct
  source 1..19: mol_type = other RNA
gggctttctttgtgtattt

SEQ ID NO: 69 - RNA, 19 nt, synthetic construct
  source 1..19: mol_type = other RNA
ggctttctttgtgtatttg

SEQ ID NO: 70 - RNA, 19 nt, synthetic construct
  source 1..19: mol_type = other RNA
gctttctttgtgtatttgc

SEQ ID NO: 71 - RNA, 19 nt, synthetic construct
  source 1..19: mol_type = other RNA
ctttctttgtgtatttgcc

SEQ ID NO: 72 - RNA, 19 nt, synthetic construct
  source 1..19: mol_type = other RNA
tttctttgtgtatttgcca

SEQ ID NO: 73 - RNA, 19 nt, synthetic construct
  source 1..19: mol_type = other RNA
ttctttgtgtatttgccat

SEQ ID NO: 74 - RNA, 19 nt, synthetic construct
  source 1..19: mol_type = other RNA
tctttgtgtatttgccata

SEQ ID NO: 75 - RNA, 19 nt, synthetic construct
  source 1..19: mol_type = other RNA
ctttgtgtatttgccataa

SEQ ID NO: 76 - RNA, 19 nt, synthetic construct
  source 1..19: mol_type = other RNA
tttgtgtatttgccataaa

SEQ ID NO: 77 - RNA, 19 nt, synthetic construct
  source 1..19: mol_type = other RNA
ttgtgtatttgccataaat

SEQ ID NO: 78 - RNA, 19 nt, synthetic construct
  source 1..19: mol_type = other RNA
tgtgtatttgccataaata

SEQ ID NO: 79 - RNA, 19 nt, synthetic construct
  source 1..19: mol_type = other RNA
gtgtatttgccataaataa

SEQ ID NO: 80 - RNA, 19 nt, synthetic construct
  source 1..19: mol_type = other RNA
tgtatttgccataaataat

SEQ ID NO: 81 - RNA, 19 nt, synthetic construct
  source 1..19: mol_type = other RNA
gtatttgccataaataata

SEQ ID NO: 82 - RNA, 19 nt, synthetic construct
  source 1..19: mol_type = other RNA
tatttgccataaataatac

SEQ ID NO: 83 - RNA, 19 nt, synthetic construct
  source 1..19: mol_type = other RNA
atttgccataaataatact

SEQ ID NO: 84 - RNA, 19 nt, synthetic construct
  source 1..19: mol_type = other RNA
tttgccataaataatacta

SEQ ID NO: 85 - RNA, 19 nt, synthetic construct
  source 1..19: mol_type = other RNA
tgaagatattcaccattat

SEQ ID NO: 86 - RNA, 19 nt, synthetic construct
  source 1..19: mol_type = other RNA
gaagatattcaccattata

SEQ ID NO: 87 - RNA, 19 nt, synthetic construct
  source 1..19: mol_type = other RNA
agatattcaccattataga

SEQ ID NO: 88 - RNA, 19 nt, synthetic construct
  source 1..19: mol_type = other RNA
aaacatcagcaaagacaag

SEQ ID NO: 89 - RNA, 19 nt, synthetic construct
  source 1..19: mol_type = other RNA
aacatcagcaaagacaaga

SEQ ID NO: 90 - RNA, 19 nt, synthetic construct
  source 1..19: mol_type = other RNA
acatcagcaaagacaagac

SEQ ID NO: 91 - RNA, 19 nt, synthetic construct
  source 1..19: mol_type = other RNA
catcagcaaagacaagaca

SEQ ID NO: 92 - RNA, 19 nt, synthetic construct
  source 1..19: mol_type = other RNA
atcagcaaagacaagacag

SEQ ID NO: 93 - RNA, 19 nt, synthetic construct
  source 1..19: mol_type = other RNA
gatattctcgacacagcag

SEQ ID NO: 94 - RNA, 19 nt, synthetic construct
  source 1..19: mol_type = other RNA
ttcaccattatagagaaca

SEQ ID NO: 95 - RNA, 19 nt, synthetic construct
  source 1..19: mol_type = other RNA
tattctcgacacagcaggt

SEQ ID NO: 96 - RNA, 19 nt, synthetic construct
  source 1..19: mol_type = other RNA
ttctcgacacagcaggtca

SEQ ID NO: 97 - RNA, 19 nt, synthetic construct
  source 1..19: mol_type = other RNA
aagatattcaccattatag

SEQ ID NO: 98 - RNA, 19 nt, synthetic construct
  source 1..19: mol_type = other RNA
gatattcaccattatagag

SEQ ID NO: 99 - RNA, 19 nt, synthetic construct
  source 1..19: mol_type = other RNA
atattcaccattatagaga

SEQ ID NO: 100 - RNA, 19 nt, synthetic construct
  source 1..19: mol_type = other RNA
tattcaccattatagagaa

SEQ ID NO: 101 - RNA, 19 nt, synthetic construct
  source 1..19: mol_type = other RNA
attcaccattatagagaac

SEQ ID NO: 102 - RNA, 19 nt, synthetic construct
  source 1..19: mol_type = other RNA
tcaccattatagagaacaa

SEQ ID NO: 103 - RNA, 19 nt, synthetic construct
  source 1..19: mol_type = other RNA
caccattatagagaacaaa

SEQ ID NO: 104 - RNA, 19 nt, synthetic construct
  source 1..19: mol_type = other RNA
accattatagagaacaaat

SEQ ID NO: 105 - RNA, 19 nt, synthetic construct
  source 1..19: mol_type = other RNA
ccattatagagaacaaatt

SEQ ID NO: 106 - RNA, 19 nt, synthetic construct
  source 1..19: mol_type = other RNA
cattatagagaacaaatta

SEQ ID NO: 107 - RNA, 19 nt, synthetic construct
  source 1..19: mol_type = other RNA
attatagagaacaaattaa

SEQ ID NO: 108 - RNA, 19 nt, synthetic construct
  source 1..19: mol_type = other RNA
ttatagagaacaaattaaa

SEQ ID NO: 109 - RNA, 19 nt, synthetic construct
  source 1..19: mol_type = other RNA
tatagagaacaaattaaaa

SEQ ID NO: 110 - RNA, 19 nt, synthetic construct
  source 1..19: mol_type = other RNA
atagagaacaaattaaaag

SEQ ID NO: 111 - RNA, 19 nt, synthetic construct
  source 1..19: mol_type = other RNA
tagagaacaaattaaaaga

SEQ ID NO: 112 - RNA, 19 nt, synthetic construct
  source 1..19: mol_type = other RNA
agagaacaaattaaaagag

SEQ ID NO: 113 - RNA, 19 nt, synthetic construct
  source 1..19: mol_type = other RNA
gaagatgtacctatggtcc

SEQ ID NO: 114 - RNA, 19 nt, synthetic construct
  source 1..19: mol_type = other RNA
aagatgtacctatggtcct

SEQ ID NO: 115 - RNA, 19 nt, synthetic construct
  source 1..19: mol_type = other RNA
agatgtacctatggtccta

SEQ ID NO: 116 - RNA, 19 nt, synthetic construct
  source 1..19: mol_type = other RNA
gatgtacctatggtcctag

SEQ ID NO: 117 - RNA, 19 nt, synthetic construct
  source 1..19: mol_type = other RNA
atgtacctatggtcctagt

SEQ ID NO: 118 - RNA, 19 nt, synthetic construct
  source 1..19: mol_type = other RNA
tgtacctatggtcctagta

SEQ ID NO: 119 - RNA, 19 nt, synthetic construct
  source 1..19: mol_type = other RNA
gtacctatggtcctagtag

SEQ ID NO: 120 - RNA, 19 nt, synthetic construct
  source 1..19: mol_type = other RNA
tacctatggtcctagtagg

SEQ ID NO: 121 - RNA, 19 nt, synthetic construct
  source 1..19: mol_type = other RNA
acctatggtcctagtagga

SEQ ID NO: 122 - RNA, 19 nt, synthetic construct
  source 1..19: mol_type = other RNA
cctatggtcctagtaggaa

SEQ ID NO: 123 - RNA, 19 nt, synthetic construct
  source 1..19: mol_type = other RNA
ctatggtcctagtaggaaa

SEQ ID NO: 124 - RNA, 19 nt, synthetic construct
  source 1..19: mol_type = other RNA
tatggtcctagtaggaaat

SEQ ID NO: 125 - RNA, 19 nt, synthetic construct
  source 1..19: mol_type = other RNA
atggtcctagtaggaaata

SEQ ID NO: 126 - RNA, 19 nt, synthetic construct
  source 1..19: mol_type = other RNA
tggtcctagtaggaaataa

SEQ ID NO: 127 - RNA, 19 nt, synthetic construct
  source 1..19: mol_type = other RNA
ggtcctagtaggaaataaa

SEQ ID NO: 128 - RNA, 19 nt, synthetic construct
  source 1..19: mol_type = other RNA
gtcctagtaggaaataaat

SEQ ID NO: 129 - RNA, 19 nt, synthetic construct
  source 1..19: mol_type = other RNA
tcctagtaggaaataaatg

SEQ ID NO: 130 - RNA, 19 nt, synthetic construct
  source 1..19: mol_type = other RNA
cctagtaggaaataaatgt

SEQ ID NO: 131 - RNA, 19 nt, synthetic construct
  source 1..19: mol_type = other RNA
ctagtaggaaataaatgtg

SEQ ID NO: 132 - RNA, 19 nt, synthetic construct
  source 1..19: mol_type = other RNA
tagtaggaaataaatgtga

SEQ ID NO: 133 - RNA, 19 nt, synthetic construct
  source 1..19: mol_type = other RNA
agtaggaaataaatgtgat

SEQ ID NO: 134 - RNA, 19 nt, synthetic construct
  source 1..19: mol_type = other RNA
ggaattccttttattgaaa

SEQ ID NO: 135 - RNA, 19 nt, synthetic construct
  source 1..19: mol_type = other RNA
gaattccttttattgaaac

SEQ ID NO: 136 - RNA, 19 nt, synthetic construct
  source 1..19: mol_type = other RNA
aattccttttattgaaaca

SEQ ID NO: 137 - RNA, 19 nt, synthetic construct
  source 1..19: mol_type = other RNA
attccttttattgaaacat

SEQ ID NO: 138 - RNA, 19 nt, synthetic construct
  source 1..19: mol_type = other RNA
ttccttttattgaaacatc

SEQ ID NO: 139 - RNA, 19 nt, synthetic construct
  source 1..19: mol_type = other RNA
tccttttattgaaacatca

SEQ ID NO: 140 - RNA, 19 nt, synthetic construct
  source 1..19: mol_type = other RNA
ccttttattgaaacatcag

SEQ ID NO: 141 - RNA, 19 nt, synthetic construct
  source 1..19: mol_type = other RNA
cttttattgaaacatcagc

SEQ ID NO: 142 - RNA, 19 nt, synthetic construct
  source 1..19: mol_type = other RNA
ttttattgaaacatcagca

SEQ ID NO: 143 - RNA, 19 nt, synthetic construct
  source 1..19: mol_type = other RNA
tttattgaaacatcagcaa

SEQ ID NO: 144 - RNA, 19 nt, synthetic construct
  source 1..19: mol_type = other RNA
ttattgaaacatcagcaaa

SEQ ID NO: 145 - RNA, 19 nt, synthetic construct
  source 1..19: mol_type = other RNA
tattgaaacatcagcaaag

SEQ ID NO: 146 - RNA, 19 nt, synthetic construct
  source 1..19: mol_type = other RNA
attgaaacatcagcaaaga

SEQ ID NO: 147 - RNA, 19 nt, synthetic construct
  source 1..19: mol_type = other RNA
ttgaaacatcagcaaagac

SEQ ID NO: 148 - RNA, 19 nt, synthetic construct
  source 1..19: mol_type = other RNA
tgaaacatcagcaaagaca

SEQ ID NO: 149 - RNA, 19 nt, synthetic construct
  source 1..19: mol_type = other RNA
gaaacatcagcaaagacaa

SEQ ID NO: 150 - RNA, 19 nt, synthetic construct
  source 1..19: mol_type = other RNA
atgactgaatataaacttg

SEQ ID NO: 151 - RNA, 19 nt, synthetic construct
  source 1..19: mol_type = other RNA
tgactgaatataaacttgt

SEQ ID NO: 152 - RNA, 19 nt, synthetic construct
  source 1..19: mol_type = other RNA
gactgaatataaacttgtg

SEQ ID NO: 153 - RNA, 19 nt, synthetic construct
  source 1..19: mol_type = other RNA
actgaatataaacttgtgg

SEQ ID NO: 154 - RNA, 19 nt, synthetic construct
  source 1..19: mol_type = other RNA
ctgaatataaacttgtggt

SEQ ID NO: 155 - RNA, 19 nt, synthetic construct
  source 1..19: mol_type = other RNA
tgaatataaacttgtggta

SEQ ID NO: 156 - RNA, 19 nt, synthetic construct
  source 1..19: mol_type = other RNA
gaatataaacttgtggtag

SEQ ID NO: 157 - RNA, 19 nt, synthetic construct
  source 1..19: mol_type = other RNA
aatataaacttgtggtagt

SEQ ID NO: 158 - RNA, 19 nt, synthetic construct
  source 1..19: mol_type = other RNA
atataaacttgtggtagtt

SEQ ID NO: 159 - RNA, 19 nt, synthetic construct
  source 1..19: mol_type = other RNA
tataaacttgtggtagttg

SEQ ID NO: 160 - RNA, 19 nt, synthetic construct
  source 1..19: mol_type = other RNA
ataaacttgtggtagttgg

SEQ ID NO: 161 - RNA, 19 nt, synthetic construct
  source 1..19: mol_type = other RNA
taaacttgtggtagttgga

SEQ ID NO: 162 - RNA, 19 nt, synthetic construct
  source 1..19: mol_type = other RNA
aaacttgtggtagttggag

SEQ ID NO: 163 - RNA, 19 nt, synthetic construct
  source 1..19: mol_type = other RNA
aacttgtggtagttggagc

SEQ ID NO: 164 - RNA, 19 nt, synthetic construct
  source 1..19: mol_type = other RNA
acttgtggtagttggagct

SEQ ID NO: 165 - RNA, 19 nt, synthetic construct
  source 1..19: mol_type = other RNA
cttgtggtagttggagctg

SEQ ID NO: 166 - RNA, 19 nt, synthetic construct
  source 1..19: mol_type = other RNA
ttgtggtagttggagctgg

SEQ ID NO: 167 - RNA, 19 nt, synthetic construct
  source 1..19: mol_type = other RNA
tgtggtagttggagctggt

SEQ ID NO: 168 - RNA, 19 nt, synthetic construct
  source 1..19: mol_type = other RNA
gtggtagttggagctggtg

SEQ ID NO: 169 - RNA, 19 nt, synthetic construct
  source 1..19: mol_type = other RNA
tggtagttggagctggtgg

SEQ ID NO: 170 - RNA, 19 nt, synthetic construct
  source 1..19: mol_type = other RNA
ggtagttggagctggtggc

SEQ ID NO: 171 - RNA, 19 nt, synthetic construct
  source 1..19: mol_type = other RNA
gtagttggagctggtggcg

SEQ ID NO: 172 - RNA, 19 nt, synthetic construct
  source 1..19: mol_type = other RNA
tagttggagctggtggcgt

SEQ ID NO: 173 - RNA, 19 nt, synthetic construct
  source 1..19: mol_type = other RNA
agttggagctggtggcgta

SEQ ID NO: 174 - RNA, 19 nt, synthetic construct
  source 1..19: mol_type = other RNA
gttggagctggtggcgtag

SEQ ID NO: 175 - RNA, 19 nt, synthetic construct
  source 1..19: mol_type = other RNA
ttggagctggtggcgtagg

SEQ ID NO: 176 - RNA, 19 nt, synthetic construct
  source 1..19: mol_type = other RNA
tggagctggtggcgtaggc

SEQ ID NO: 177 - RNA, 19 nt, synthetic construct
  source 1..19: mol_type = other RNA
ggagctggtggcgtaggca

SEQ ID NO: 178 - RNA, 19 nt, synthetic construct
  source 1..19: mol_type = other RNA
gagctggtggcgtaggcaa

SEQ ID NO: 179 - RNA, 19 nt, synthetic construct
  source 1..19: mol_type = other RNA
agctggtggcgtaggcaag

SEQ ID NO: 180 - RNA, 19 nt, synthetic construct
  source 1..19: mol_type = other RNA
gctggtggcgtaggcaaga

SEQ ID NO: 181 - RNA, 19 nt, synthetic construct
  source 1..19: mol_type = other RNA
ctggtggcgtaggcaagag

SEQ ID NO: 182 - RNA, 19 nt, synthetic construct
  source 1..19: mol_type = other RNA
tggtggcgtaggcaagagt

SEQ ID NO: 183 - RNA, 19 nt, synthetic construct
  source 1..19: mol_type = other RNA
ggtggcgtaggcaagagtg

SEQ ID NO: 184 - RNA, 19 nt, synthetic construct
  source 1..19: mol_type = other RNA
gtggcgtaggcaagagtgc

SEQ ID NO: 185 - RNA, 19 nt, synthetic construct
  source 1..19: mol_type = other RNA
tggcgtaggcaagagtgcc

SEQ ID NO: 186 - RNA, 19 nt, synthetic construct
  source 1..19: mol_type = other RNA
ggcgtaggcaagagtgcct

SEQ ID NO: 187 - RNA, 19 nt, synthetic construct
  source 1..19: mol_type = other RNA
gcgtaggcaagagtgcctt

SEQ ID NO: 188 - RNA, 19 nt, synthetic construct
  source 1..19: mol_type = other RNA
cgtaggcaagagtgccttg

SEQ ID NO: 189 - RNA, 19 nt, synthetic construct
  source 1..19: mol_type = other RNA
gtaggcaagagtgccttga

SEQ ID NO: 190 - RNA, 19 nt, synthetic construct
  source 1..19: mol_type = other RNA
taggcaagagtgccttgac

SEQ ID NO: 191 - RNA, 19 nt, synthetic construct
  source 1..19: mol_type = other RNA
aggcaagagtgccttgacg

SEQ ID NO: 192 - RNA, 19 nt, synthetic construct
  source 1..19: mol_type = other RNA
ggcaagagtgccttgacga

SEQ ID NO: 193 - RNA, 19 nt, synthetic construct
  source 1..19: mol_type = other RNA
gcaagagtgccttgacgat

SEQ ID NO: 194 - RNA, 19 nt, synthetic construct
  source 1..19: mol_type = other RNA
caagagtgccttgacgata

SEQ ID NO: 195 - RNA, 19 nt, synthetic construct
  source 1..19: mol_type = other RNA
aagagtgccttgacgatac

SEQ ID NO: 196 - RNA, 19 nt, synthetic construct
  source 1..19: mol_type = other RNA
agagtgccttgacgataca

SEQ ID NO: 197 - RNA, 19 nt, synthetic construct
  source 1..19: mol_type = other RNA
gagtgccttgacgatacag

SEQ ID NO: 198 - RNA, 19 nt, synthetic construct
  source 1..19: mol_type = other RNA
agtgccttgacgatacagc

SEQ ID NO: 199 - RNA, 19 nt, synthetic construct
  source 1..19: mol_type = other RNA
gtgccttgacgatacagct

SEQ ID NO: 200 - RNA, 19 nt, synthetic construct
  source 1..19: mol_type = other RNA
tgccttgacgatacagcta

SEQ ID NO: 201 - RNA, 19 nt, synthetic construct
  source 1..19: mol_type = other RNA
gccttgacgatacagctaa

SEQ ID NO: 202 - RNA, 19 nt, synthetic construct
  source 1..19: mol_type = other RNA
ccttgacgatacagctaat

SEQ ID NO: 203 - RNA, 19 nt, synthetic construct
  source 1..19: mol_type = other RNA
cttgacgatacagctaatt

SEQ ID NO: 204 - RNA, 19 nt, synthetic construct
  source 1..19: mol_type = other RNA
ttgacgatacagctaattc

SEQ ID NO: 205 - RNA, 19 nt, synthetic construct
  source 1..19: mol_type = other RNA
tgacgatacagctaattca

SEQ ID NO: 206 - RNA, 19 nt, synthetic construct
  source 1..19: mol_type = other RNA
gacgatacagctaattcag

SEQ ID NO: 207 - RNA, 19 nt, synthetic construct
  source 1..19: mol_type = other RNA
acgatacagctaattcaga

SEQ ID NO: 208 - RNA, 19 nt, synthetic construct
  source 1..19: mol_type = other RNA
cgatacagctaattcagaa

SEQ ID NO: 209 - RNA, 19 nt, synthetic construct
  source 1..19: mol_type = other RNA
gatacagctaattcagaat

SEQ ID NO: 210 - RNA, 19 nt, synthetic construct
  source 1..19: mol_type = other RNA
atacagctaattcagaatc

SEQ ID NO: 211 - RNA, 19 nt, synthetic construct
  source 1..19: mol_type = other RNA
tacagctaattcagaatca

SEQ ID NO: 212 - RNA, 19 nt, synthetic construct
  source 1..19: mol_type = other RNA
acagctaattcagaatcat

SEQ ID NO: 213 - RNA, 19 nt, synthetic construct
  source 1..19: mol_type = other RNA
cagctaattcagaatcatt

SEQ ID NO: 214 - RNA, 19 nt, synthetic construct
  source 1..19: mol_type = other RNA
agctaattcagaatcattt

SEQ ID NO: 215 - RNA, 19 nt, synthetic construct
  source 1..19: mol_type = other RNA
gctaattcagaatcatttt

SEQ ID NO: 216 - RNA, 19 nt, synthetic construct
  source 1..19: mol_type = other RNA
ctaattcagaatcattttg

SEQ ID NO: 217 - RNA, 19 nt, synthetic construct
  source 1..19: mol_type = other RNA
taattcagaatcattttgt

SEQ ID NO: 218 - RNA, 19 nt, synthetic construct
  source 1..19: mol_type = other RNA
aattcagaatcattttgtg

SEQ ID NO: 219 - RNA, 19 nt, synthetic construct
  source 1..19: mol_type = other RNA
attcagaatcattttgtgg

SEQ ID NO: 220 - RNA, 19 nt, synthetic construct
  source 1..19: mol_type = other RNA
ttcagaatcattttgtgga

SEQ ID NO: 221 - RNA, 19 nt, synthetic construct
  source 1..19: mol_type = other RNA
tcagaatcattttgtggac

SEQ ID NO: 222 - RNA, 19 nt, synthetic construct
  source 1..19: mol_type = other RNA
cagaatcattttgtggacg

SEQ ID NO: 223 - RNA, 19 nt, synthetic construct
  source 1..19: mol_type = other RNA
agaatcattttgtggacga

SEQ ID NO: 224 - RNA, 19 nt, synthetic construct
  source 1..19: mol_type = other RNA
gaatcattttgtggacgaa

SEQ ID NO: 225 - RNA, 19 nt, synthetic construct
  source 1..19: mol_type = other RNA
aatcattttgtggacgaat

SEQ ID NO: 226 - RNA, 19 nt, synthetic construct
  source 1..19: mol_type = other RNA
atcattttgtggacgaata

SEQ ID NO: 227 - RNA, 19 nt, synthetic construct
  source 1..19: mol_type = other RNA
tcattttgtggacgaatat

SEQ ID NO: 228 - RNA, 19 nt, synthetic construct
  source 1..19: mol_type = other RNA
cattttgtggacgaatatg

SEQ ID NO: 229 - RNA, 19 nt, synthetic construct
  source 1..19: mol_type = other RNA
attttgtggacgaatatga

SEQ ID NO: 230 - RNA, 19 nt, synthetic construct
  source 1..19: mol_type = other RNA
ttttgtggacgaatatgat

SEQ ID NO: 231 - RNA, 19 nt, synthetic construct
  source 1..19: mol_type = other RNA
tttgtggacgaatatgatc

SEQ ID NO: 232 - RNA, 19 nt, synthetic construct
  source 1..19: mol_type = other RNA
ttgtggacgaatatgatcc

SEQ ID NO: 233 - RNA, 19 nt, synthetic construct
  source 1..19: mol_type = other RNA
tgtggacgaatatgatcca

SEQ ID NO: 234 - RNA, 19 nt, synthetic construct
  source 1..19: mol_type = other RNA
gtggacgaatatgatccaa

SEQ ID NO: 235 - RNA, 19 nt, synthetic construct
  source 1..19: mol_type = other RNA
tggacgaatatgatccaac

SEQ ID NO: 236 - RNA, 19 nt, synthetic construct
  source 1..19: mol_type = other RNA
aggaagcaagtagtaattg

SEQ ID NO: 237 - RNA, 19 nt, synthetic construct
  source 1..19: mol_type = other RNA
ggaagcaagtagtaattga

SEQ ID NO: 238 - RNA, 19 nt, synthetic construct
  source 1..19: mol_type = other RNA
gaagcaagtagtaattgat

SEQ ID NO: 239 - RNA, 19 nt, synthetic construct
  source 1..19: mol_type = other RNA
aagcaagtagtaattgatg

SEQ ID NO: 240 - RNA, 19 nt, synthetic construct
  source 1..19: mol_type = other RNA
agcaagtagtaattgatgg

SEQ ID NO: 241 - RNA, 19 nt, synthetic construct
  source 1..19: mol_type = other RNA
gcaagtagtaattgatgga

SEQ ID NO: 242 - RNA, 19 nt, synthetic construct
  source 1..19: mol_type = other RNA
caagtagtaattgatggag

SEQ ID NO: 243 - RNA, 19 nt, synthetic construct
  source 1..19: mol_type = other RNA
aagtagtaattgatggaga

SEQ ID NO: 244 - RNA, 19 nt, synthetic construct
  source 1..19: mol_type = other RNA
agtagtaattgatggagaa

SEQ ID NO: 245 - RNA, 19 nt, synthetic construct
  source 1..19: mol_type = other RNA
gtagtaattgatggagaaa

SEQ ID NO: 246 - RNA, 19 nt, synthetic construct
  source 1..19: mol_type = other RNA
tagtaattgatggagaaac

SEQ ID NO: 247 - RNA, 19 nt, synthetic construct
  source 1..19: mol_type = other RNA
agtaattgatggagaaacc

SEQ ID NO: 248 - RNA, 19 nt, synthetic construct
  source 1..19: mol_type = other RNA
gtaattgatggagaaacct

SEQ ID NO: 249 - RNA, 19 nt, synthetic construct
  source 1..19: mol_type = other RNA
taattgatggagaaacctg

SEQ ID NO: 250 - RNA, 19 nt, synthetic construct
  source 1..19: mol_type = other RNA
aattgatggagaaacctgt

SEQ ID NO: 251 - RNA, 19 nt, synthetic construct
  source 1..19: mol_type = other RNA
attgatggagaaacctgtc

SEQ ID NO: 252 - RNA, 19 nt, synthetic construct
  source 1..19: mol_type = other RNA
ttgatggagaaacctgtct

SEQ ID NO: 253 - RNA, 19 nt, synthetic construct
  source 1..19: mol_type = other RNA
tgatggagaaacctgtctc

SEQ ID NO: 254 - RNA, 19 nt, synthetic construct
  source 1..19: mol_type = other RNA
gatggagaaacctgtctct

SEQ ID NO: 255 - RNA, 19 nt, synthetic construct
  source 1..19: mol_type = other RNA
atggagaaacctgtctctt

SEQ ID NO: 256 - RNA, 19 nt, synthetic construct
  source 1..19: mol_type = other RNA
tggagaaacctgtctcttg

SEQ ID NO: 257 - RNA, 19 nt, synthetic construct
  source 1..19: mol_type = other RNA
ggagaaacctgtctcttgg

SEQ ID NO: 258 - RNA, 19 nt, synthetic construct
  source 1..19: mol_type = other RNA
gagaaacctgtctcttgga

SEQ ID NO: 259 - RNA, 19 nt, synthetic construct
  source 1..19: mol_type = other RNA
agaaacctgtctcttggat

SEQ ID NO: 260 - RNA, 19 nt, synthetic construct
  source 1..19: mol_type = other RNA
gaaacctgtctcttggata

SEQ ID NO: 261 - RNA, 19 nt, synthetic construct
  source 1..19: mol_type = other RNA
aaacctgtctcttggatat

SEQ ID NO: 262 - RNA, 19 nt, synthetic construct
  source 1..19: mol_type = other RNA
aacctgtctcttggatatt

SEQ ID NO: 263 - RNA, 19 nt, synthetic construct
  source 1..19: mol_type = other RNA
acctgtctcttggatattc

SEQ ID NO: 264 - RNA, 19 nt, synthetic construct
  source 1..19: mol_type = other RNA
cctgtctcttggatattct

SEQ ID NO: 265 - RNA, 19 nt, synthetic construct
  source 1..19: mol_type = other RNA
ctgtctcttggatattctc

SEQ ID NO: 266 - RNA, 19 nt, synthetic construct
  source 1..19: mol_type = other RNA
tgtctcttggatattctcg

SEQ ID NO: 267 - RNA, 19 nt, synthetic construct
  source 1..19: mol_type = other RNA
gtctcttggatattctcga

SEQ ID NO: 268 - RNA, 19 nt, synthetic construct
  source 1..19: mol_type = other RNA
tctcttggatattctcgac

SEQ ID NO: 269 - RNA, 19 nt, synthetic construct
  source 1..19: mol_type = other RNA
ctcttggatattctcgaca

SEQ ID NO: 270 - RNA, 19 nt, synthetic construct
  source 1..19: mol_type = other RNA
tcttggatattctcgacac

SEQ ID NO: 271 - RNA, 19 nt, synthetic construct
  source 1..19: mol_type = other RNA
cttggatattctcgacaca

SEQ ID NO: 272 - RNA, 19 nt, synthetic construct
  source 1..19: mol_type = other RNA
agtacagtgcaatgaggga

SEQ ID NO: 273 - RNA, 19 nt, synthetic construct
  source 1..19: mol_type = other RNA
gtacagtgcaatgagggac

SEQ ID NO: 274 - RNA, 19 nt, synthetic construct
  source 1..19: mol_type = other RNA
tacagtgcaatgagggacc

SEQ ID NO: 275 - RNA, 19 nt, synthetic construct
  source 1..19: mol_type = other RNA
acagtgcaatgagggacca

SEQ ID NO: 276 - RNA, 19 nt, synthetic construct
  source 1..19: mol_type = other RNA
cagtgcaatgagggaccag

SEQ ID NO: 277 - RNA, 19 nt, synthetic construct
  source 1..19: mol_type = other RNA
agtgcaatgagggaccagt

SEQ ID NO: 278 - RNA, 19 nt, synthetic construct
  source 1..19: mol_type = other RNA
gtgcaatgagggaccagta

SEQ ID NO: 279 - RNA, 19 nt, synthetic construct
  source 1..19: mol_type = other RNA
tgcaatgagggaccagtac

SEQ ID NO: 280 - RNA, 19 nt, synthetic construct
  source 1..19: mol_type = other RNA
gcaatgagggaccagtaca

SEQ ID NO: 281 - RNA, 19 nt, synthetic construct
  source 1..19: mol_type = other RNA
caatgagggaccagtacat

SEQ ID NO: 282 - RNA, 19 nt, synthetic construct
  source 1..19: mol_type = other RNA
aatgagggaccagtacatg

SEQ ID NO: 283 - RNA, 19 nt, synthetic construct
  source 1..19: mol_type = other RNA
atgagggaccagtacatga

SEQ ID NO: 284 - RNA, 19 nt, synthetic construct
  source 1..19: mol_type = other RNA
tgagggaccagtacatgag

SEQ ID NO: 285 - RNA, 19 nt, synthetic construct
  source 1..19: mol_type = other RNA
gagggaccagtacatgagg

SEQ ID NO: 286 - RNA, 19 nt, synthetic construct
  source 1..19: mol_type = other RNA
agggaccagtacatgagga

SEQ ID NO: 287 - RNA, 19 nt, synthetic construct
  source 1..19: mol_type = other RNA
gggaccagtacatgaggac

SEQ ID NO: 288 - RNA, 19 nt, synthetic construct
  source 1..19: mol_type = other RNA
ggaccagtacatgaggact

SEQ ID NO: 289 - RNA, 19 nt, synthetic construct
  source 1..19: mol_type = other RNA
gaccagtacatgaggactg

SEQ ID NO: 290 - RNA, 19 nt, synthetic construct
  source 1..19: mol_type = other RNA
accagtacatgaggactgg

SEQ ID NO: 291 - RNA, 19 nt, synthetic construct
  source 1..19: mol_type = other RNA
ccagtacatgaggactggg

SEQ ID NO: 292 - RNA, 19 nt, synthetic construct
  source 1..19: mol_type = other RNA
cagtacatgaggactgggg

SEQ ID NO: 293 - RNA, 19 nt, synthetic construct
  source 1..19: mol_type = other RNA
agtacatgaggactgggga

SEQ ID NO: 294 - RNA, 19 nt, synthetic construct
  source 1..19: mol_type = other RNA
gtacatgaggactggggag

SEQ ID NO: 295 - RNA, 19 nt, synthetic construct
  source 1..19: mol_type = other RNA
tacatgaggactggggagg

SEQ ID NO: 296 - RNA, 19 nt, synthetic construct
  source 1..19: mol_type = other RNA
acatgaggactggggaggg

SEQ ID NO: 297 - RNA, 19 nt, synthetic construct
  source 1..19: mol_type = other RNA
catgaggactggggagggc

SEQ ID NO: 298 - RNA, 19 nt, synthetic construct
  source 1..19: mol_type = other RNA
atgaggactggggagggct

SEQ ID NO: 299 - RNA, 19 nt, synthetic construct
  source 1..19: mol_type = other RNA
tgaggactggggagggctt

SEQ ID NO: 300 - RNA, 19 nt, synthetic construct
  source 1..19: mol_type = other RNA
gaggactggggagggcttt

SEQ ID NO: 301 - RNA, 19 nt, synthetic construct
  source 1..19: mol_type = other RNA
aggactggggagggctttc

SEQ ID NO: 302 - RNA, 19 nt, synthetic construct
  source 1..19: mol_type = other RNA
ggactggggagggctttct

SEQ ID NO: 303 - RNA, 19 nt, synthetic construct
  source 1..19: mol_type = other RNA
gactggggagggctttctt

SEQ ID NO: 304 - RNA, 19 nt, synthetic construct
  source 1..19: mol_type = other RNA
actggggagggctttcttt

SEQ ID NO: 305 - RNA, 19 nt, synthetic construct
  source 1..19: mol_type = other RNA
ctggggagggctttctttg

SEQ ID NO: 306 - RNA, 19 nt, synthetic construct
  source 1..19: mol_type = other RNA
tggggagggctttctttgt

SEQ ID NO: 307 - RNA, 19 nt, synthetic construct
  source 1..19: mol_type = other RNA
ttgccataaataatactaa

SEQ ID NO: 308 - RNA, 19 nt, synthetic construct
  source 1..19: mol_type = other RNA
tgccataaataatactaaa

SEQ ID NO: 309 - RNA, 19 nt, synthetic construct
  source 1..19: mol_type = other RNA
gccataaataatactaaat

SEQ ID NO: 310 - RNA, 19 nt, synthetic construct
  source 1..19: mol_type = other RNA
ccataaataatactaaatc

SEQ ID NO: 311 - RNA, 19 nt, synthetic construct
  source 1..19: mol_type = other RNA
cataaataatactaaatca

SEQ ID NO: 312 - RNA, 19 nt, synthetic construct
  source 1..19: mol_type = other RNA
ataaataatactaaatcat

SEQ ID NO: 313 - RNA, 19 nt, synthetic construct
  source 1..19: mol_type = other RNA
taaataatactaaatcatt

SEQ ID NO: 314 - RNA, 19 nt, synthetic construct
  source 1..19: mol_type = other RNA
aaataatactaaatcattt

SEQ ID NO: 315 - RNA, 19 nt, synthetic construct
  source 1..19: mol_type = other RNA
aataatactaaatcatttg

SEQ ID NO: 316 - RNA, 19 nt, synthetic construct
  source 1..19: mol_type = other RNA
ataatactaaatcatttga

SEQ ID NO: 317 - RNA, 19 nt, synthetic construct
  source 1..19: mol_type = other RNA
taatactaaatcatttgaa

SEQ ID NO: 318 - RNA, 19 nt, synthetic construct
  source 1..19: mol_type = other RNA
aatactaaatcatttgaag

SEQ ID NO: 319 - RNA, 19 nt, synthetic construct
  source 1..19: mol_type = other RNA
atactaaatcatttgaaga

SEQ ID NO: 320 - RNA, 19 nt, synthetic construct
  source 1..19: mol_type = other RNA
tactaaatcatttgaagat

SEQ ID NO: 321 - RNA, 19 nt, synthetic construct
  source 1..19: mol_type = other RNA
actaaatcatttgaagata

SEQ ID NO: 322 - RNA, 19 nt, synthetic construct
  source 1..19: mol_type = other RNA
ctaaatcatttgaagatat

SEQ ID NO: 323 - RNA, 19 nt, synthetic construct
  source 1..19: mol_type = other RNA
taaatcatttgaagatatt

SEQ ID NO: 324 - RNA, 19 nt, synthetic construct
  source 1..19: mol_type = other RNA
aaatcatttgaagatattc

SEQ ID NO: 325 - RNA, 19 nt, synthetic construct
  source 1..19: mol_type = other RNA
aatcatttgaagatattca

SEQ ID NO: 326 - RNA, 19 nt, synthetic construct
  source 1..19: mol_type = other RNA
tcatttgaagatattcacc

SEQ ID NO: 327 - RNA, 19 nt, synthetic construct
  source 1..19: mol_type = other RNA
catttgaagatattcacca

SEQ ID NO: 328 - RNA, 19 nt, synthetic construct
  source 1..19: mol_type = other RNA
atttgaagatattcaccat

SEQ ID NO: 329 - RNA, 19 nt, synthetic construct
  source 1..19: mol_type = other RNA
tttgaagatattcaccatt

SEQ ID NO: 330 - RNA, 19 nt, synthetic construct
  source 1..19: mol_type = other RNA
ttgaagatattcaccatta

SEQ ID NO: 331 - RNA, 19 nt, synthetic construct
  source 1..19: mol_type = other RNA
gagaacaaattaaaagagt

SEQ ID NO: 332 - RNA, 19 nt, synthetic construct
  source 1..19: mol_type = other RNA
agaacaaattaaaagagtt

SEQ ID NO: 333 - RNA, 19 nt, synthetic construct
  source 1..19: mol_type = other RNA
gaacaaattaaaagagtta

SEQ ID NO: 334 - RNA, 19 nt, synthetic construct
  source 1..19: mol_type = other RNA
aacaaattaaaagagttaa

SEQ ID NO: 335 - RNA, 19 nt, synthetic construct
  source 1..19: mol_type = other RNA
acaaattaaaagagttaag

SEQ ID NO: 336 - RNA, 19 nt, synthetic construct
  source 1..19: mol_type = other RNA
caaattaaaagagttaagg

SEQ ID NO: 337 - RNA, 19 nt, synthetic construct
  source 1..19: mol_type = other RNA
aaattaaaagagttaagga

SEQ ID NO: 338 - RNA, 19 nt, synthetic construct
  source 1..19: mol_type = other RNA
aattaaaagagttaaggac

SEQ ID NO: 339 - RNA, 19 nt, synthetic construct
  source 1..19: mol_type = other RNA
attaaaagagttaaggact

SEQ ID NO: 340 - RNA, 19 nt, synthetic construct
  source 1..19: mol_type = other RNA
ttaaaagagttaaggactc

SEQ ID NO: 341 - RNA, 19 nt, synthetic construct
  source 1..19: mol_type = other RNA
taaaagagttaaggactct

SEQ ID NO: 342 - RNA, 19 nt, synthetic construct
  source 1..19: mol_type = other RNA
aaaagagttaaggactctg

SEQ ID NO: 343 - RNA, 19 nt, synthetic construct
  source 1..19: mol_type = other RNA
aaagagttaaggactctga

SEQ ID NO: 344 - RNA, 19 nt, synthetic construct
  source 1..19: mol_type = other RNA
aagagttaaggactctgaa

SEQ ID NO: 345 - RNA, 19 nt, synthetic construct
  source 1..19: mol_type = other RNA
gagttaaggactctgaaga

SEQ ID NO: 346 - RNA, 19 nt, synthetic construct
  source 1..19: mol_type = other RNA
agttaaggactctgaagat

SEQ ID NO: 347 - RNA, 19 nt, synthetic construct
  source 1..19: mol_type = other RNA
gttaaggactctgaagatg

SEQ ID NO: 348 - RNA, 19 nt, synthetic construct
  source 1..19: mol_type = other RNA
ttaaggactctgaagatgt

SEQ ID NO: 349 - RNA, 19 nt, synthetic construct
  source 1..19: mol_type = other RNA
aaggactctgaagatgtac

SEQ ID NO: 350 - RNA, 19 nt, synthetic construct
  source 1..19: mol_type = other RNA
aggactctgaagatgtacc

SEQ ID NO: 351 - RNA, 19 nt, synthetic construct
  source 1..19: mol_type = other RNA
ggactctgaagatgtacct

SEQ ID NO: 352 - RNA, 19 nt, synthetic construct
  source 1..19: mol_type = other RNA
gactctgaagatgtaccta

SEQ ID NO: 353 - RNA, 19 nt, synthetic construct
  source 1..19: mol_type = other RNA
actctgaagatgtacctat

SEQ ID NO: 354 - RNA, 19 nt, synthetic construct
  source 1..19: mol_type = other RNA
ctctgaagatgtacctatg

SEQ ID NO: 355 - RNA, 19 nt, synthetic construct
  source 1..19: mol_type = other RNA
tctgaagatgtacctatgg

SEQ ID NO: 356 - RNA, 19 nt, synthetic construct
  source 1..19: mol_type = other RNA
ctgaagatgtacctatggt

SEQ ID NO: 357 - RNA, 19 nt, synthetic construct
  source 1..19: mol_type = other RNA
tgaagatgtacctatggtc

SEQ ID NO: 358 - RNA, 19 nt, synthetic construct
  source 1..19: mol_type = other RNA
gtaggaaataaatgtgatt

SEQ ID NO: 359 - RNA, 19 nt, synthetic construct
  source 1..19: mol_type = other RNA
taggaaataaatgtgattt

SEQ ID NO: 360 - RNA, 19 nt, synthetic construct
  source 1..19: mol_type = other RNA
aggaaataaatgtgatttg

SEQ ID NO: 361 - RNA, 19 nt, synthetic construct
  source 1..19: mol_type = other RNA
ggaaataaatgtgatttgc

SEQ ID NO: 362 - RNA, 19 nt, synthetic construct
  source 1..19: mol_type = other RNA
gaaataaatgtgatttgcc

SEQ ID NO: 363 - RNA, 19 nt, synthetic construct
  source 1..19: mol_type = other RNA
aaataaatgtgatttgcct

SEQ ID NO: 364 - RNA, 19 nt, synthetic construct
  source 1..19: mol_type = other RNA
aataaatgtgatttgcctt

SEQ ID NO: 365 - RNA, 19 nt, synthetic construct
  source 1..19: mol_type = other RNA
ataaatgtgatttgccttc

SEQ ID NO: 366 - RNA, 19 nt, synthetic construct
  source 1..19: mol_type = other RNA
taaatgtgatttgccttct

SEQ ID NO: 367 - RNA, 19 nt, synthetic construct
  source 1..19: mol_type = other RNA
aaatgtgatttgccttcta

SEQ ID NO: 368 - RNA, 19 nt, synthetic construct
  source 1..19: mol_type = other RNA
aatgtgatttgccttctag

SEQ ID NO: 369 - RNA, 19 nt, synthetic construct
  source 1..19: mol_type = other RNA
atgtgatttgccttctaga

SEQ ID NO: 370 - RNA, 19 nt, synthetic construct
  source 1..19: mol_type = other RNA
tgtgatttgccttctagaa

SEQ ID NO: 371 - RNA, 19 nt, synthetic construct
  source 1..19: mol_type = other RNA
gtgatttgccttctagaac

SEQ ID NO: 372 - RNA, 19 nt, synthetic construct
  source 1..19: mol_type = other RNA
tgatttgccttctagaaca

SEQ ID NO: 373 - RNA, 19 nt, synthetic construct
  source 1..19: mol_type = other RNA
gatttgccttctagaacag

SEQ ID NO: 374 - RNA, 19 nt, synthetic construct
  source 1..19: mol_type = other RNA
atttgccttctagaacagt

SEQ ID NO: 375 - RNA, 19 nt, synthetic construct
  source 1..19: mol_type = other RNA
tttgccttctagaacagta

SEQ ID NO: 376 - RNA, 19 nt, synthetic construct
  source 1..19: mol_type = other RNA
tgccttctagaacagtaga

SEQ ID NO: 377 - RNA, 19 nt, synthetic construct
  source 1..19: mol_type = other RNA
gccttctagaacagtagac

SEQ ID NO: 378 - RNA, 19 nt, synthetic construct
  source 1..19: mol_type = other RNA
ccttctagaacagtagaca

SEQ ID NO: 379 - RNA, 19 nt, synthetic construct
  source 1..19: mol_type = other RNA
cttctagaacagtagacac

SEQ ID NO: 380 - RNA, 19 nt, synthetic construct
  source 1..19: mol_type = other RNA
ttctagaacagtagacaca

SEQ ID NO: 381 - RNA, 19 nt, synthetic construct
  source 1..19: mol_type = other RNA
tctagaacagtagacacaa

SEQ ID NO: 382 - RNA, 19 nt, synthetic construct
  source 1..19: mol_type = other RNA
ctagaacagtagacacaaa

SEQ ID NO: 383 - RNA, 19 nt, synthetic construct
  source 1..19: mol_type = other RNA
tagaacagtagacacaaaa

SEQ ID NO: 384 - RNA, 19 nt, synthetic construct
  source 1..19: mol_type = other RNA
agaacagtagacacaaaac

SEQ ID NO: 385 - RNA, 19 nt, synthetic construct
  source 1..19: mol_type = other RNA
gaacagtagacacaaaaca

SEQ ID NO: 386 - RNA, 19 nt, synthetic construct
  source 1..19: mol_type = other RNA
aacagtagacacaaaacag

SEQ ID NO: 387 - RNA, 19 nt, synthetic construct
  source 1..19: mol_type = other RNA
acagtagacacaaaacagg

SEQ ID NO: 388 - RNA, 19 nt, synthetic construct
  source 1..19: mol_type = other RNA
cagtagacacaaaacaggc

SEQ ID NO: 389 - RNA, 19 nt, synthetic construct
  source 1..19: mol_type = other RNA
agtagacacaaaacaggct

SEQ ID NO: 390 - RNA, 19 nt, synthetic construct
  source 1..19: mol_type = other RNA
gtagacacaaaacaggctc

SEQ ID NO: 391 - RNA, 19 nt, synthetic construct
  source 1..19: mol_type = other RNA
tagacacaaaacaggctca

SEQ ID NO: 392 - RNA, 19 nt, synthetic construct
  source 1..19: mol_type = other RNA
agacacaaaacaggctcag

SEQ ID NO: 393 - RNA, 19 nt, synthetic construct
  source 1..19: mol_type = other RNA
gacacaaaacaggctcagg

SEQ ID NO: 394 - RNA, 19 nt, synthetic construct
  source 1..19: mol_type = other RNA
acacaaaacaggctcagga

SEQ ID NO: 395 - RNA, 19 nt, synthetic construct
  source 1..19: mol_type = other RNA
cacaaaacaggctcaggac

SEQ ID NO: 396 - RNA, 19 nt, synthetic construct
  source 1..19: mol_type = other RNA
acaaaacaggctcaggact

SEQ ID NO: 397 - RNA, 19 nt, synthetic construct
  source 1..19: mol_type = other RNA
caaaacaggctcaggactt

SEQ ID NO: 398 - RNA, 19 nt, synthetic construct
  source 1..19: mol_type = other RNA
aaaacaggctcaggactta

SEQ ID NO: 399 - RNA, 19 nt, synthetic construct
  source 1..19: mol_type = other RNA
aaacaggctcaggacttag

SEQ ID NO: 400 - RNA, 19 nt, synthetic construct
  source 1..19: mol_type = other RNA
aacaggctcaggacttagc

SEQ ID NO: 401 - RNA, 19 nt, synthetic construct
  source 1..19: mol_type = other RNA
acaggctcaggacttagca

SEQ ID NO: 402 - RNA, 19 nt, synthetic construct
  source 1..19: mol_type = other RNA
caggctcaggacttagcaa

SEQ ID NO: 403 - RNA, 19 nt, synthetic construct
  source 1..19: mol_type = other RNA
aggctcaggacttagcaag

SEQ ID NO: 404 - RNA, 19 nt, synthetic construct
  source 1..19: mol_type = other RNA
ggctcaggacttagcaaga

SEQ ID NO: 405 - RNA, 19 nt, synthetic construct
  source 1..19: mol_type = other RNA
gctcaggacttagcaagaa

SEQ ID NO: 406 - RNA, 19 nt, synthetic construct
  source 1..19: mol_type = other RNA
ctcaggacttagcaagaag

SEQ ID NO: 407 - RNA, 19 nt, synthetic construct
  source 1..19: mol_type = other RNA
tcaggacttagcaagaagt

SEQ ID NO: 408 - RNA, 19 nt, synthetic construct
  source 1..19: mol_type = other RNA
caggacttagcaagaagtt

SEQ ID NO: 409 - RNA, 19 nt, synthetic construct
  source 1..19: mol_type = other RNA
aggacttagcaagaagtta

SEQ ID NO: 410 - RNA, 19 nt, synthetic construct
  source 1..19: mol_type = other RNA
ggacttagcaagaagttat

SEQ ID NO: 411 - RNA, 19 nt, synthetic construct
  source 1..19: mol_type = other RNA
gacttagcaagaagttatg

SEQ ID NO: 412 - RNA, 19 nt, synthetic construct
  source 1..19: mol_type = other RNA
acttagcaagaagttatgg

SEQ ID NO: 413 - RNA, 19 nt, synthetic construct
  source 1..19: mol_type = other RNA
cttagcaagaagttatgga

SEQ ID NO: 414 - RNA, 19 nt, synthetic construct
  source 1..19: mol_type = other RNA
ttagcaagaagttatggaa

SEQ ID NO: 415 - RNA, 19 nt, synthetic construct
  source 1..19: mol_type = other RNA
tagcaagaagttatggaat

SEQ ID NO: 416 - RNA, 19 nt, synthetic construct
  source 1..19: mol_type = other RNA
agcaagaagttatggaatt

SEQ ID NO: 417 - RNA, 19 nt, synthetic construct
  source 1..19: mol_type = other RNA
gcaagaagttatggaattc

SEQ ID NO: 418 - RNA, 19 nt, synthetic construct
  source 1..19: mol_type = other RNA
caagaagttatggaattcc

SEQ ID NO: 419 - RNA, 19 nt, synthetic construct
  source 1..19: mol_type = other RNA
aagaagttatggaattcct

SEQ ID NO: 420 - RNA, 19 nt, synthetic construct
  source 1..19: mol_type = other RNA
agaagttatggaattcctt

SEQ ID NO: 421 - RNA, 19 nt, synthetic construct
  source 1..19: mol_type = other RNA
gaagttatggaattccttt

SEQ ID NO: 422 - RNA, 19 nt, synthetic construct
  source 1..19: mol_type = other RNA
aagttatggaattcctttt

SEQ ID NO: 423 - RNA, 19 nt, synthetic construct
  source 1..19: mol_type = other RNA
agttatggaattcctttta

SEQ ID NO: 424 - RNA, 19 nt, synthetic construct
  source 1..19: mol_type = other RNA
gttatggaattccttttat

SEQ ID NO: 425 - RNA, 19 nt, synthetic construct
  source 1..19: mol_type = other RNA
ttatggaattccttttatt

SEQ ID NO: 426 - RNA, 19 nt, synthetic construct
  source 1..19: mol_type = other RNA
tatggaattccttttattg

SEQ ID NO: 427 - RNA, 19 nt, synthetic construct
  source 1..19: mol_type = other RNA
atggaattccttttattga

SEQ ID NO: 428 - RNA, 19 nt, synthetic construct
  source 1..19: mol_type = other RNA
tgttggatcatattcgtcc

SEQ ID NO: 429 - RNA, 19 nt, synthetic construct
  source 1..19: mol_type = other RNA
ttgttggatcatattcgtc

SEQ ID NO: 430 - RNA, 19 nt, synthetic construct
  source 1..19: mol_type = other RNA
attgttggatcatattcgt

SEQ ID NO: 431 - RNA, 19 nt, synthetic construct
  source 1..19: mol_type = other RNA
tattgttggatcatattcg

SEQ ID NO: 432 - RNA, 19 nt, synthetic construct
  source 1..19: mol_type = other RNA
ctattgttggatcatattc

SEQ ID NO: 433 - RNA, 19 nt, synthetic construct
  source 1..19: mol_type = other RNA
tctattgttggatcatatt

SEQ ID NO: 434 - RNA, 19 nt, synthetic construct
  source 1..19: mol_type = other RNA
ctctattgttggatcatat

SEQ ID NO: 435 - RNA, 19 nt, synthetic construct
  source 1..19: mol_type = other RNA
cctctattgttggatcata

SEQ ID NO: 436 - RNA, 19 nt, synthetic construct
  source 1..19: mol_type = other RNA
tcctctattgttggatcat

SEQ ID NO: 437 - RNA, 19 nt, synthetic construct
  source 1..19: mol_type = other RNA
atcctctattgttggatca

SEQ ID NO: 438 - RNA, 19 nt, synthetic construct
  source 1..19: mol_type = other RNA
aatcctctattgttggatc

SEQ ID NO: 439 - RNA, 19 nt, synthetic construct
  source 1..19: mol_type = other RNA
gaatcctctattgttggat

SEQ ID NO: 440 - RNA, 19 nt, synthetic construct
  source 1..19: mol_type = other RNA
ggaatcctctattgttgga

SEQ ID NO: 441 - RNA, 19 nt, synthetic construct
  source 1..19: mol_type = other RNA
aggaatcctctattgttgg

SEQ ID NO: 442 - RNA, 19 nt, synthetic construct
  source 1..19: mol_type = other RNA
taggaatcctctattgttg

SEQ ID NO: 443 - RNA, 19 nt, synthetic construct
  source 1..19: mol_type = other RNA
gtaggaatcctctattgtt

SEQ ID NO: 444 - RNA, 19 nt, synthetic construct
  source 1..19: mol_type = other RNA
tgtaggaatcctctattgt

SEQ ID NO: 445 - RNA, 19 nt, synthetic construct
  source 1..19: mol_type = other RNA
ctgtaggaatcctctattg

SEQ ID NO: 446 - RNA, 19 nt, synthetic construct
  source 1..19: mol_type = other RNA
cctgtaggaatcctctatt

SEQ ID NO: 447 - RNA, 19 nt, synthetic construct
  source 1..19: mol_type = other RNA
tcctgtaggaatcctctat

SEQ ID NO: 448 - RNA, 19 nt, synthetic construct
  source 1..19: mol_type = other RNA
ttcctgtaggaatcctcta

SEQ ID NO: 449 - RNA, 19 nt, synthetic construct
  source 1..19: mol_type = other RNA
cttcctgtaggaatcctct

SEQ ID NO: 450 - RNA, 19 nt, synthetic construct
  source 1..19: mol_type = other RNA
gcttcctgtaggaatcctc

SEQ ID NO: 451 - RNA, 19 nt, synthetic construct
  source 1..19: mol_type = other RNA
tgcttcctgtaggaatcct

SEQ ID NO: 452 - RNA, 19 nt, synthetic construct
  source 1..19: mol_type = other RNA
ttgcttcctgtaggaatcc

SEQ ID NO: 453 - RNA, 19 nt, synthetic construct
  source 1..19: mol_type = other RNA
cttgcttcctgtaggaatc

SEQ ID NO: 454 - RNA, 19 nt, synthetic construct
  source 1..19: mol_type = other RNA
acttgcttcctgtaggaat

SEQ ID NO: 455 - RNA, 19 nt, synthetic construct
  source 1..19: mol_type = other RNA
tacttgcttcctgtaggaa

SEQ ID NO: 456 - RNA, 19 nt, synthetic construct
  source 1..19: mol_type = other RNA
ctacttgcttcctgtagga

SEQ ID NO: 457 - RNA, 19 nt, synthetic construct
  source 1..19: mol_type = other RNA
actacttgcttcctgtagg

SEQ ID NO: 458 - RNA, 19 nt, synthetic construct
  source 1..19: mol_type = other RNA
tactacttgcttcctgtag

SEQ ID NO: 459 - RNA, 19 nt, synthetic construct
  source 1..19: mol_type = other RNA
ttactacttgcttcctgta

SEQ ID NO: 460 - RNA, 19 nt, synthetic construct
  source 1..19: mol_type = other RNA
attactacttgcttcctgt

SEQ ID NO: 461 - RNA, 19 nt, synthetic construct
  source 1..19: mol_type = other RNA
aattactacttgcttcctg

SEQ ID NO: 462 - RNA, 19 nt, synthetic construct
  source 1..19: mol_type = other RNA
ctgtgtcgagaatatccaa

SEQ ID NO: 463 - RNA, 19 nt, synthetic construct
  source 1..19: mol_type = other RNA
gctgtgtcgagaatatcca

SEQ ID NO: 464 - RNA, 19 nt, synthetic construct
  source 1..19: mol_type = other RNA
tgctgtgtcgagaatatcc

SEQ ID NO: 465 - RNA, 19 nt, synthetic construct
  source 1..19: mol_type = other RNA
cctgctgtgtcgagaatat

SEQ ID NO: 466 - RNA, 19 nt, synthetic construct
  source 1..19: mol_type = other RNA
gacctgctgtgtcgagaat

SEQ ID NO: 467 - RNA, 19 nt, synthetic construct
  source 1..19: mol_type = other RNA
ttgacctgctgtgtcgaga

SEQ ID NO: 468 - RNA, 19 nt, synthetic construct
  source 1..19: mol_type = other RNA
cttgacctgctgtgtcgag

SEQ ID NO: 469 - RNA, 19 nt, synthetic construct
  source 1..19: mol_type = other RNA
tcttgacctgctgtgtcga

SEQ ID NO: 470 - RNA, 19 nt, synthetic construct
  source 1..19: mol_type = other RNA
ctcttgacctgctgtgtcg

SEQ ID NO: 471 - RNA, 19 nt, synthetic construct
  source 1..19: mol_type = other RNA
cctcttgacctgctgtgtc

SEQ ID NO: 472 - RNA, 19 nt, synthetic construct
  source 1..19: mol_type = other RNA
tcctcttgacctgctgtgt

SEQ ID NO: 473 - RNA, 19 nt, synthetic construct
  source 1..19: mol_type = other RNA
ctcctcttgacctgctgtg

SEQ ID NO: 474 - RNA, 19 nt, synthetic construct
  source 1..19: mol_type = other RNA
actcctcttgacctgctgt

SEQ ID NO: 475 - RNA, 19 nt, synthetic construct
  source 1..19: mol_type = other RNA
tactcctcttgacctgctg

SEQ ID NO: 476 - RNA, 19 nt, synthetic construct
  source 1..19: mol_type = other RNA
gtactcctcttgacctgct

SEQ ID NO: 477 - RNA, 19 nt, synthetic construct
  source 1..19: mol_type = other RNA
tgtactcctcttgacctgc

SEQ ID NO: 478 - RNA, 19 nt, synthetic construct
  source 1..19: mol_type = other RNA
ctgtactcctcttgacctg

SEQ ID NO: 479 - RNA, 19 nt, synthetic construct
  source 1..19: mol_type = other RNA
actgtactcctcttgacct

SEQ ID NO: 480 - RNA, 19 nt, synthetic construct
  source 1..19: mol_type = other RNA
cactgtactcctcttgacc

SEQ ID NO: 481 - RNA, 19 nt, synthetic construct
  source 1..19: mol_type = other RNA
gcactgtactcctcttgac

SEQ ID NO: 482 - RNA, 19 nt, synthetic construct
  source 1..19: mol_type = other RNA
tgcactgtactcctcttga

SEQ ID NO: 483 - RNA, 19 nt, synthetic construct
  source 1..19: mol_type = other RNA
ttgcactgtactcctcttg

SEQ ID NO: 484 - RNA, 19 nt, synthetic construct
  source 1..19: mol_type = other RNA
attgcactgtactcctctt

SEQ ID NO: 485 - RNA, 19 nt, synthetic construct
  source 1..19: mol_type = other RNA
cattgcactgtactcctct

SEQ ID NO: 486 - RNA, 19 nt, synthetic construct
  source 1..19: mol_type = other RNA
tcattgcactgtactcctc

SEQ ID NO: 487 - RNA, 19 nt, synthetic construct
  source 1..19: mol_type = other RNA
ctcattgcactgtactcct

SEQ ID NO: 488 - RNA, 19 nt, synthetic construct
  source 1..19: mol_type = other RNA
cctcattgcactgtactcc

SEQ ID NO: 489 - RNA, 19 nt, synthetic construct
  source 1..19: mol_type = other RNA
ccctcattgcactgtactc

SEQ ID NO: 490 - RNA, 19 nt, synthetic construct
  source 1..19: mol_type = other RNA
cacaaagaaagccctcccc

SEQ ID NO: 491 - RNA, 19 nt, synthetic construct
  source 1..19: mol_type = other RNA
acacaaagaaagccctccc

SEQ ID NO: 492 - RNA, 19 nt, synthetic construct
  source 1..19: mol_type = other RNA
tacacaaagaaagccctcc

SEQ ID NO: 493 - RNA, 19 nt, synthetic construct
  source 1..19: mol_type = other RNA
atacacaaagaaagccctc

SEQ ID NO: 494 - RNA, 19 nt, synthetic construct
  source 1..19: mol_type = other RNA
aatacacaaagaaagccct

SEQ ID NO: 495 - RNA, 19 nt, synthetic construct
  source 1..19: mol_type = other RNA
aaatacacaaagaaagccc

SEQ ID NO: 496 - RNA, 19 nt, synthetic construct
  source 1..19: mol_type = other RNA
caaatacacaaagaaagcc

SEQ ID NO: 497 - RNA, 19 nt, synthetic construct
  source 1..19: mol_type = other RNA
gcaaatacacaaagaaagc

SEQ ID NO: 498 - RNA, 19 nt, synthetic construct
  source 1..19: mol_type = other RNA
ggcaaatacacaaagaaag

SEQ ID NO: 499 - RNA, 19 nt, synthetic construct
  source 1..19: mol_type = other RNA
tggcaaatacacaaagaaa

SEQ ID NO: 500 - RNA, 19 nt, synthetic construct
  source 1..19: mol_type = other RNA
atggcaaatacacaaagaa

SEQ ID NO: 501 - RNA, 19 nt, synthetic construct
  source 1..19: mol_type = other RNA
tatggcaaatacacaaaga

SEQ ID NO: 502 - RNA, 19 nt, synthetic construct
  source 1..19: mol_type = other RNA
ttatggcaaatacacaaag

SEQ ID NO: 503 - RNA, 19 nt, synthetic construct
  source 1..19: mol_type = other RNA
tttatggcaaatacacaaa

SEQ ID NO: 504 - RNA, 19 nt, synthetic construct
  source 1..19: mol_type = other RNA
atttatggcaaatacacaa

SEQ ID NO: 505 - RNA, 19 nt, synthetic construct
  source 1..19: mol_type = other RNA
tatttatggcaaatacaca

SEQ ID NO: 506 - RNA, 19 nt, synthetic construct
  source 1..19: mol_type = other RNA
ttatttatggcaaatacac

SEQ ID NO: 507 - RNA, 19 nt, synthetic construct
  source 1..19: mol_type = other RNA
attatttatggcaaataca

SEQ ID NO: 508 - RNA, 19 nt, synthetic construct
  source 1..19: mol_type = other RNA
tattatttatggcaaatac

SEQ ID NO: 509 - RNA, 19 nt, synthetic construct
  source 1..19: mol_type = other RNA
gtattatttatggcaaata

SEQ ID NO: 510 - RNA, 19 nt, synthetic construct
  source 1..19: mol_type = other RNA
agtattatttatggcaaat

SEQ ID NO: 511 - RNA, 19 nt, synthetic construct
  source 1..19: mol_type = other RNA
tagtattatttatggcaaa

SEQ ID NO: 512 - RNA, 19 nt, synthetic construct
  source 1..19: mol_type = other RNA
ataatggtgaatatcttca

SEQ ID NO: 513 - RNA, 19 nt, synthetic construct
  source 1..19: mol_type = other RNA
tataatggtgaatatcttc

SEQ ID NO: 514 - RNA, 19 nt, synthetic construct
  source 1..19: mol_type = other RNA
tctataatggtgaatatct

SEQ ID NO: 515 - RNA, 19 nt, synthetic construct
  source 1..19: mol_type = other RNA
cttgtctttgctgatgttt

SEQ ID NO: 516 - RNA, 19 nt, synthetic construct
  source 1..19: mol_type = other RNA
tcttgtctttgctgatgtt

SEQ ID NO: 517 - RNA, 19 nt, synthetic construct
  source 1..19: mol_type = other RNA
gtcttgtctttgctgatgt

SEQ ID NO: 518 - RNA, 19 nt, synthetic construct
  source 1..19: mol_type = other RNA
tgtcttgtctttgctgatg

SEQ ID NO: 519 - RNA, 19 nt, synthetic construct
  source 1..19: mol_type = other RNA
ctgtcttgtctttgctgat

SEQ ID NO: 520 - RNA, 19 nt, synthetic construct
  source 1..19: mol_type = other RNA
ctgctgtgtcgagaatatc

SEQ ID NO: 521 - RNA, 19 nt, synthetic construct
  source 1..19: mol_type = other RNA
tgttctctataatggtgaa

SEQ ID NO: 522 - RNA, 19 nt, synthetic construct
  source 1..19: mol_type = other RNA
acctgctgtgtcgagaata

SEQ ID NO: 523 - RNA, 19 nt, synthetic construct
  source 1..19: mol_type = other RNA
tgacctgctgtgtcgagaa

SEQ ID NO: 524 - RNA, 19 nt, synthetic construct
  source 1..19: mol_type = other RNA
ctataatggtgaatatctt

SEQ ID NO: 525 - RNA, 19 nt, synthetic construct
  source 1..19: mol_type = other RNA
ctctataatggtgaatatc

SEQ ID NO: 526 - RNA, 19 nt, synthetic construct
  source 1..19: mol_type = other RNA
tctctataatggtgaatat

SEQ ID NO: 527 - RNA, 19 nt, synthetic construct
  source 1..19: mol_type = other RNA
ttctctataatggtgaata

SEQ ID NO: 528 - RNA, 19 nt, synthetic construct
  source 1..19: mol_type = other RNA
gttctctataatggtgaat

SEQ ID NO: 529 - RNA, 19 nt, synthetic construct
  source 1..19: mol_type = other RNA
ttgttctctataatggtga

SEQ ID NO: 530 - RNA, 19 nt, synthetic construct
  source 1..19: mol_type = other RNA
tttgttctctataatggtg

SEQ ID NO: 531 - RNA, 19 nt, synthetic construct
  source 1..19: mol_type = other RNA
atttgttctctataatggt

SEQ ID NO: 532 - RNA, 19 nt, synthetic construct
  source 1..19: mol_type = other RNA
aatttgttctctataatgg

SEQ ID NO: 533 - RNA, 19 nt, synthetic construct
  source 1..19: mol_type = other RNA
taatttgttctctataatg

SEQ ID NO: 534 - RNA, 19 nt, synthetic construct
  source 1..19: mol_type = other RNA
ttaatttgttctctataat

SEQ ID NO: 535 - RNA, 19 nt, synthetic construct
  source 1..19: mol_type = other RNA
tttaatttgttctctataa

SEQ ID NO: 536 - RNA, 19 nt, synthetic construct
  source 1..19: mol_type = other RNA
ttttaatttgttctctata

SEQ ID NO: 537 - RNA, 19 nt, synthetic construct
  source 1..19: mol_type = other RNA
cttttaatttgttctctat

SEQ ID NO: 538 - RNA, 19 nt, synthetic construct
  source 1..19: mol_type = other RNA
tcttttaatttgttctcta

SEQ ID NO: 539 - RNA, 19 nt, synthetic construct
  source 1..19: mol_type = other RNA
ctcttttaatttgttctct

SEQ ID NO: 540 - RNA, 19 nt, synthetic construct
  source 1..19: mol_type = other RNA
ggaccataggtacatcttc

SEQ ID NO: 541 - RNA, 19 nt, synthetic construct
  source 1..19: mol_type = other RNA
aggaccataggtacatctt

SEQ ID NO: 542 - RNA, 19 nt, synthetic construct
  source 1..19: mol_type = other RNA
taggaccataggtacatct

SEQ ID NO: 543 - RNA, 19 nt, synthetic construct
  source 1..19: mol_type = other RNA
ctaggaccataggtacatc

SEQ ID NO: 544 - RNA, 19 nt, synthetic construct
  source 1..19: mol_type = other RNA
actaggaccataggtacat

SEQ ID NO: 545 - RNA, 19 nt, synthetic construct
  source 1..19: mol_type = other RNA
tactaggaccataggtaca

SEQ ID NO: 546 - RNA, 19 nt, synthetic construct
  source 1..19: mol_type = other RNA
ctactaggaccataggtac

SEQ ID NO: 547 - RNA, 19 nt, synthetic construct
  source 1..19: mol_type = other RNA
cctactaggaccataggta

SEQ ID NO: 548 - RNA, 19 nt, synthetic construct
  source 1..19: mol_type = other RNA
tcctactaggaccataggt

SEQ ID NO: 549 - RNA, 19 nt, synthetic construct
  source 1..19: mol_type = other RNA
ttcctactaggaccatagg

SEQ ID NO: 550 - RNA, 19 nt, synthetic construct
  source 1..19: mol_type = other RNA
tttcctactaggaccatag

SEQ ID NO: 551 - RNA, 19 nt, synthetic construct
  source 1..19: mol_type = other RNA
atttcctactaggaccata

SEQ ID NO: 552 - RNA, 19 nt, synthetic construct
  source 1..19: mol_type = other RNA
tatttcctactaggaccat

SEQ ID NO: 553 - RNA, 19 nt, synthetic construct
  source 1..19: mol_type = other RNA
ttatttcctactaggacca

SEQ ID NO: 554 - RNA, 19 nt, synthetic construct
  source 1..19: mol_type = other RNA
tttatttcctactaggacc

SEQ ID NO: 555 - RNA, 19 nt, synthetic construct
  source 1..19: mol_type = other RNA
atttatttcctactaggac

SEQ ID NO: 556 - RNA, 19 nt, synthetic construct
  source 1..19: mol_type = other RNA
catttatttcctactagga

SEQ ID NO: 557 - RNA, 19 nt, synthetic construct
  source 1..19: mol_type = other RNA
acatttatttcctactagg

SEQ ID NO: 558 - RNA, 19 nt, synthetic construct
  source 1..19: mol_type = other RNA
cacatttatttcctactag

SEQ ID NO: 559 - RNA, 19 nt, synthetic construct
  source 1..19: mol_type = other RNA
tcacatttatttcctacta

SEQ ID NO: 560 - RNA, 19 nt, synthetic construct
  source 1..19: mol_type = other RNA
atcacatttatttcctact

SEQ ID NO: 561 - RNA, 19 nt, synthetic construct
  source 1..19: mol_type = other RNA
tttcaataaaaggaattcc

SEQ ID NO: 562 - RNA, 19 nt, synthetic construct
  source 1..19: mol_type = other RNA
gtttcaataaaaggaattc

SEQ ID NO: 563 - RNA, 19 nt, synthetic construct
  source 1..19: mol_type = other RNA
tgtttcaataaaaggaatt

SEQ ID NO: 564 - RNA, 19 nt, synthetic construct
  source 1..19: mol_type = other RNA
atgtttcaataaaaggaat

SEQ ID NO: 565 - RNA, 19 nt, synthetic construct
  source 1..19: mol_type = other RNA
gatgtttcaataaaaggaa

SEQ ID NO: 566 - RNA, 19 nt, synthetic construct
  source 1..19: mol_type = other RNA
tgatgtttcaataaaagga

SEQ ID NO: 567 - RNA, 19 nt, synthetic construct
  source 1..19: mol_type = other RNA
ctgatgtttcaataaaagg

SEQ ID NO: 568 - RNA, 19 nt, synthetic construct
  source 1..19: mol_type = other RNA
gctgatgtttcaataaaag

SEQ ID NO: 569 - RNA, 19 nt, synthetic construct
  source 1..19: mol_type = other RNA
tgctgatgtttcaataaaa

SEQ ID NO: 570 - RNA, 19 nt, synthetic construct
  source 1..19: mol_type = other RNA
ttgctgatgtttcaataaa

SEQ ID NO: 571 - RNA, 19 nt, synthetic construct
  source 1..19: mol_type = other RNA
tttgctgatgtttcaataa

SEQ ID NO: 572 - RNA, 19 nt, synthetic construct
  source 1..19: mol_type = other RNA
ctttgctgatgtttcaata

SEQ ID NO: 573 - RNA, 19 nt, synthetic construct
  source 1..19: mol_type = other RNA
tctttgctgatgtttcaat

SEQ ID NO: 574 - RNA, 19 nt, synthetic construct
  source 1..19: mol_type = other RNA
gtctttgctgatgtttcaa

SEQ ID NO: 575 - RNA, 19 nt, synthetic construct
  source 1..19: mol_type = other RNA
tgtctttgctgatgtttca

SEQ ID NO: 576 - RNA, 19 nt, synthetic construct
  source 1..19: mol_type = other RNA
ttgtctttgctgatgtttc

SEQ ID NO: 577 - RNA, 19 nt, synthetic construct
  source 1..19: mol_type = other RNA
caagtttatattcagtcat

SEQ ID NO: 578 - RNA, 19 nt, synthetic construct
  source 1..19: mol_type = other RNA
acaagtttatattcagtca

SEQ ID NO: 579 - RNA, 19 nt, synthetic construct
  source 1..19: mol_type = other RNA
cacaagtttatattcagtc

SEQ ID NO: 580 - RNA, 19 nt, synthetic construct
  source 1..19: mol_type = other RNA
ccacaagtttatattcagt

SEQ ID NO: 581 - RNA, 19 nt, synthetic construct
  source 1..19: mol_type = other RNA
accacaagtttatattcag

SEQ ID NO: 582 - RNA, 19 nt, synthetic construct
  source 1..19: mol_type = other RNA
taccacaagtttatattca

SEQ ID NO: 583 - RNA, 19 nt, synthetic construct
  source 1..19: mol_type = other RNA
ctaccacaagtttatattc

SEQ ID NO: 584 - RNA, 19 nt, synthetic construct
  source 1..19: mol_type = other RNA
actaccacaagtttatatt

SEQ ID NO: 585 - RNA, 19 nt, synthetic construct
  source 1..19: mol_type = other RNA
aactaccacaagtttatat

SEQ ID NO: 586 - RNA, 19 nt, synthetic construct
  source 1..19: mol_type = other RNA
caactaccacaagtttata

SEQ ID NO: 587 - RNA, 19 nt, synthetic construct
  source 1..19: mol_type = other RNA
ccaactaccacaagtttat

SEQ ID NO: 588 - RNA, 19 nt, synthetic construct
  source 1..19: mol_type = other RNA
tccaactaccacaagttta

SEQ ID NO: 589 - RNA, 19 nt, synthetic construct
  source 1..19: mol_type = other RNA
ctccaactaccacaagttt

SEQ ID NO: 590 - RNA, 19 nt, synthetic construct
  source 1..19: mol_type = other RNA
gctccaactaccacaagtt

SEQ ID NO: 591 - RNA, 19 nt, synthetic construct
  source 1..19: mol_type = other RNA
agctccaactaccacaagt

SEQ ID NO: 592 - RNA, 19 nt, synthetic construct
  source 1..19: mol_type = other RNA
cagctccaactaccacaag

SEQ ID NO: 593 - RNA, 19 nt, synthetic construct
  source 1..19: mol_type = other RNA
ccagctccaactaccacaa

SEQ ID NO: 594 - RNA, 19 nt, synthetic construct
  source 1..19: mol_type = other RNA
accagctccaactaccaca

SEQ ID NO: 595 - RNA, 19 nt, synthetic construct
  source 1..19: mol_type = other RNA
caccagctccaactaccac

SEQ ID NO: 596 - RNA, 19 nt, synthetic construct
  source 1..19: mol_type = other RNA
ccaccagctccaactacca

SEQ ID NO: 597 - RNA, 19 nt, synthetic construct
  source 1..19: mol_type = other RNA
gccaccagctccaactacc

SEQ ID NO: 598 - RNA, 19 nt, synthetic construct
  source 1..19: mol_type = other RNA
cgccaccagctccaactac

SEQ ID NO: 599 - RNA, 19 nt, synthetic construct
  source 1..19: mol_type = other RNA
acgccaccagctccaacta

SEQ ID NO: 600 - RNA, 19 nt, synthetic construct
  source 1..19: mol_type = other RNA
tacgccaccagctccaact

SEQ ID NO: 601 - RNA, 19 nt, synthetic construct
  source 1..19: mol_type = other RNA
ctacgccaccagctccaac

SEQ ID NO: 602 - RNA, 19 nt, synthetic construct
  source 1..19: mol_type = other RNA
cctacgccaccagctccaa

SEQ ID NO: 603 - RNA, 19 nt, synthetic construct
  source 1..19: mol_type = other RNA
gcctacgccaccagctcca

SEQ ID NO: 604 - RNA, 19 nt, synthetic construct
  source 1..19: mol_type = other RNA
tgcctacgccaccagctcc

SEQ ID NO: 605 - RNA, 19 nt, synthetic construct
  source 1..19: mol_type = other RNA
ttgcctacgccaccagctc

SEQ ID NO: 606 - RNA, 19 nt, synthetic construct
  source 1..19: mol_type = other RNA
cttgcctacgccaccagct

SEQ ID NO: 607 - RNA, 19 nt, synthetic construct
  source 1..19: mol_type = other RNA
tcttgcctacgccaccagc

SEQ ID NO: 608 - RNA, 19 nt, synthetic construct
  source 1..19: mol_type = other RNA
ctcttgcctacgccaccag

SEQ ID NO: 609 - RNA, 19 nt, synthetic construct
  source 1..19: mol_type = other RNA
actcttgcctacgccacca

SEQ ID NO: 610 - RNA, 19 nt, synthetic construct
  source 1..19: mol_type = other RNA
cactcttgcctacgccacc

SEQ ID NO: 611 - RNA, 19 nt, synthetic construct
  source 1..19: mol_type = other RNA
gcactcttgcctacgccac

SEQ ID NO: 612 - RNA, 19 nt, synthetic construct
  source 1..19: mol_type = other RNA
ggcactcttgcctacgcca

SEQ ID NO: 613 - RNA, 19 nt, synthetic construct
  source 1..19: mol_type = other RNA
aggcactcttgcctacgcc

SEQ ID NO: 614 - RNA, 19 nt, synthetic construct
  source 1..19: mol_type = other RNA
aaggcactcttgcctacgc

SEQ ID NO: 615 - RNA, 19 nt, synthetic construct
  source 1..19: mol_type = other RNA
caaggcactcttgcctacg

SEQ ID NO: 616 - RNA, 19 nt, synthetic construct
  source 1..19: mol_type = other RNA
tcaaggcactcttgcctac

SEQ ID NO: 617 - RNA, 19 nt, synthetic construct
  source 1..19: mol_type = other RNA
gtcaaggcactcttgccta

SEQ ID NO: 618 - RNA, 19 nt, synthetic construct
  source 1..19: mol_type = other RNA
cgtcaaggcactcttgcct

SEQ ID NO: 619 - RNA, 19 nt, synthetic construct
  source 1..19: mol_type = other RNA
tcgtcaaggcactcttgcc

SEQ ID NO: 620 - RNA, 19 nt, synthetic construct
  source 1..19: mol_type = other RNA
atcgtcaaggcactcttgc

SEQ ID NO: 621 - RNA, 19 nt, synthetic construct
  source 1..19: mol_type = other RNA
tatcgtcaaggcactcttg

SEQ ID NO: 622 - RNA, 19 nt, synthetic construct
  source 1..19: mol_type = other RNA
gtatcgtcaaggcactctt

SEQ ID NO: 623 - RNA, 19 nt, synthetic construct
  source 1..19: mol_type = other RNA
tgtatcgtcaaggcactct

SEQ ID NO: 624 - RNA, 19 nt, synthetic construct
  source 1..19: mol_type = other RNA
ctgtatcgtcaaggcactc

SEQ ID NO: 625 - RNA, 19 nt, synthetic construct
  source 1..19: mol_type = other RNA
gctgtatcgtcaaggcact

SEQ ID NO: 626 - RNA, 19 nt, synthetic construct
  source 1..19: mol_type = other RNA
agctgtatcgtcaaggcac

SEQ ID NO: 627 - RNA, 19 nt, synthetic construct
  source 1..19: mol_type = other RNA
tagctgtatcgtcaaggca

SEQ ID NO: 628 - RNA, 19 nt, synthetic construct
  source 1..19: mol_type = other RNA
ttagctgtatcgtcaaggc

SEQ ID NO: 629 - RNA, 19 nt, synthetic construct
  source 1..19: mol_type = other RNA
attagctgtatcgtcaagg

SEQ ID NO: 630 - RNA, 19 nt, synthetic construct
  source 1..19: mol_type = other RNA
aattagctgtatcgtcaag

SEQ ID NO: 631 - RNA, 19 nt, synthetic construct
  source 1..19: mol_type = other RNA
gaattagctgtatcgtcaa

SEQ ID NO: 632 - RNA, 19 nt, synthetic construct
  source 1..19: mol_type = other RNA
tgaattagctgtatcgtca

SEQ ID NO: 633 - RNA, 19 nt, synthetic construct
  source 1..19: mol_type = other RNA
ctgaattagctgtatcgtc

SEQ ID NO: 634 - RNA, 19 nt, synthetic construct
  source 1..19: mol_type = other RNA
tctgaattagctgtatcgt

SEQ ID NO: 635 - RNA, 19 nt, synthetic construct
  source 1..19: mol_type = other RNA
ttctgaattagctgtatcg

SEQ ID NO: 636 - RNA, 19 nt, synthetic construct
  source 1..19: mol_type = other RNA
attctgaattagctgtatc

SEQ ID NO: 637 - RNA, 19 nt, synthetic construct
  source 1..19: mol_type = other RNA
gattctgaattagctgtat

SEQ ID NO: 638 - RNA, 19 nt, synthetic construct
  source 1..19: mol_type = other RNA
tgattctgaattagctgta

SEQ ID NO: 639 - RNA, 19 nt, synthetic construct
  source 1..19: mol_type = other RNA
atgattctgaattagctgt

SEQ ID NO: 640 - RNA, 19 nt, synthetic construct
  source 1..19: mol_type = other RNA
aatgattctgaattagctg

SEQ ID NO: 641 - RNA, 19 nt, synthetic construct
  source 1..19: mol_type = other RNA
aaatgattctgaattagct

SEQ ID NO: 642 - RNA, 19 nt, synthetic construct
  source 1..19: mol_type = other RNA
aaaatgattctgaattagc

SEQ ID NO: 643 - RNA, 19 nt, synthetic construct
  source 1..19: mol_type = other RNA
caaaatgattctgaattag

SEQ ID NO: 644 - RNA, 19 nt, synthetic construct
  source 1..19: mol_type = other RNA
acaaaatgattctgaatta

SEQ ID NO: 645 - RNA, 19 nt, synthetic construct
  source 1..19: mol_type = other RNA
cacaaaatgattctgaatt

SEQ ID NO: 646 - RNA, 19 nt, synthetic construct
  source 1..19: mol_type = other RNA
ccacaaaatgattctgaat

SEQ ID NO: 647 - RNA, 19 nt, synthetic construct
  source 1..19: mol_type = other RNA
tccacaaaatgattctgaa

SEQ ID NO: 648 - RNA, 19 nt, synthetic construct
  source 1..19: mol_type = other RNA
gtccacaaaatgattctga

SEQ ID NO: 649 - RNA, 19 nt, synthetic construct
  source 1..19: mol_type = other RNA
cgtccacaaaatgattctg

SEQ ID NO: 650 - RNA, 19 nt, synthetic construct
  source 1..19: mol_type = other RNA
tcgtccacaaaatgattct

SEQ ID NO: 651 - RNA, 19 nt, synthetic construct
  source 1..19: mol_type = other RNA
ttcgtccacaaaatgattc

SEQ ID NO: 652 - RNA, 19 nt, synthetic construct
  source 1..19: mol_type = other RNA
attcgtccacaaaatgatt

SEQ ID NO: 653 - RNA, 19 nt, synthetic construct
  source 1..19: mol_type = other RNA
tattcgtccacaaaatgat

SEQ ID NO: 654 - RNA, 19 nt, synthetic construct
  source 1..19: mol_type = other RNA
atattcgtccacaaaatga

SEQ ID NO: 655 - RNA, 19 nt, synthetic construct
  source 1..19: mol_type = other RNA
catattcgtccacaaaatg

SEQ ID NO: 656 - RNA, 19 nt, synthetic construct
  source 1..19: mol_type = other RNA
tcatattcgtccacaaaat

SEQ ID NO: 657 - RNA, 19 nt, synthetic construct
  source 1..19: mol_type = other RNA
atcatattcgtccacaaaa

SEQ ID NO: 658 - RNA, 19 nt, synthetic construct
  source 1..19: mol_type = other RNA
gatcatattcgtccacaaa

SEQ ID NO: 659 - RNA, 19 nt, synthetic construct
  source 1..19: mol_type = other RNA
ggatcatattcgtccacaa

SEQ ID NO: 660 - RNA, 19 nt, synthetic construct
  source 1..19: mol_type = other RNA
tggatcatattcgtccaca

SEQ ID NO: 661 - RNA, 19 nt, synthetic construct
  source 1..19: mol_type = other RNA
ttggatcatattcgtccac

SEQ ID NO: 662 - RNA, 19 nt, synthetic construct
  source 1..19: mol_type = other RNA
gttggatcatattcgtcca

SEQ ID NO: 663 - RNA, 19 nt, synthetic construct
  source 1..19: mol_type = other RNA
caattactacttgcttcct

SEQ ID NO: 664 - RNA, 19 nt, synthetic construct
  source 1..19: mol_type = other RNA
tcaattactacttgcttcc

SEQ ID NO: 665 - RNA, 19 nt, synthetic construct
  source 1..19: mol_type = other RNA
atcaattactacttgcttc

SEQ ID NO: 666 - RNA, 19 nt, synthetic construct
  source 1..19: mol_type = other RNA
catcaattactacttgctt

SEQ ID NO: 667 - RNA, 19 nt, synthetic construct
  source 1..19: mol_type = other RNA
ccatcaattactacttgct

SEQ ID NO: 668 - RNA, 19 nt, synthetic construct
  source 1..19: mol_type = other RNA
tccatcaattactacttgc

SEQ ID NO: 669 - RNA, 19 nt, synthetic construct
  source 1..19: mol_type = other RNA
ctccatcaattactacttg

SEQ ID NO: 670 - RNA, 19 nt, synthetic construct
  source 1..19: mol_type = other RNA
tctccatcaattactactt

SEQ ID NO: 671 - RNA, 19 nt, synthetic construct
  source 1..19: mol_type = other RNA
ttctccatcaattactact

SEQ ID NO: 672 - RNA, 19 nt, synthetic construct
  source 1..19: mol_type = other RNA
tttctccatcaattactac

SEQ ID NO: 673 - RNA, 19 nt, synthetic construct
  source 1..19: mol_type = other RNA
gtttctccatcaattacta

SEQ ID NO: 674 - RNA, 19 nt, synthetic construct
  source 1..19: mol_type = other RNA
ggtttctccatcaattact

SEQ ID NO: 675 - RNA, 19 nt, synthetic construct
  source 1..19: mol_type = other RNA
aggtttctccatcaattac

SEQ ID NO: 676 - RNA, 19 nt, synthetic construct
  source 1..19: mol_type = other RNA
caggtttctccatcaatta

SEQ ID NO: 677 - RNA, 19 nt, synthetic construct
  source 1..19: mol_type = other RNA
acaggtttctccatcaatt

SEQ ID NO: 678 - RNA, 19 nt, synthetic construct
  source 1..19: mol_type = other RNA
gacaggtttctccatcaat

SEQ ID NO: 679 - RNA, 19 nt, synthetic construct
  source 1..19: mol_type = other RNA
agacaggtttctccatcaa

SEQ ID NO: 680 - RNA, 19 nt, synthetic construct
  source 1..19: mol_type = other RNA
gagacaggtttctccatca

SEQ ID NO: 681 - RNA, 19 nt, synthetic construct
  source 1..19: mol_type = other RNA
agagacaggtttctccatc

SEQ ID NO: 682 - RNA, 19 nt, synthetic construct
  source 1..19: mol_type = other RNA
aagagacaggtttctccat

SEQ ID NO: 683 - RNA, 19 nt, synthetic construct
  source 1..19: mol_type = other RNA
caagagacaggtttctcca

SEQ ID NO: 684 - RNA, 19 nt, synthetic construct
  source 1..19: mol_type = other RNA
ccaagagacaggtttctcc

SEQ ID NO: 685 - RNA, 19 nt, synthetic construct
  source 1..19: mol_type = other RNA
tccaagagacaggtttctc

SEQ ID NO: 686 - RNA, 19 nt, synthetic construct
  source 1..19: mol_type = other RNA
atccaagagacaggtttct

SEQ ID NO: 687 - RNA, 19 nt, synthetic construct
  source 1..19: mol_type = other RNA
tatccaagagacaggtttc

SEQ ID NO: 688 - RNA, 19 nt, synthetic construct
  source 1..19: mol_type = other RNA
atatccaagagacaggttt

SEQ ID NO: 689 - RNA, 19 nt, synthetic construct
  source 1..19: mol_type = other RNA
aatatccaagagacaggtt

SEQ ID NO: 690 - RNA, 19 nt, synthetic construct
  source 1..19: mol_type = other RNA
gaatatccaagagacaggt

SEQ ID NO: 691 - RNA, 19 nt, synthetic construct
  source 1..19: mol_type = other RNA
agaatatccaagagacagg

SEQ ID NO: 692 - RNA, 19 nt, synthetic construct
  source 1..19: mol_type = other RNA
gagaatatccaagagacag

SEQ ID NO: 693 - RNA, 19 nt, synthetic construct
  source 1..19: mol_type = other RNA
cgagaatatccaagagaca

SEQ ID NO: 694 - RNA, 19 nt, synthetic construct
  source 1..19: mol_type = other RNA
tcgagaatatccaagagac

SEQ ID NO: 695 - RNA, 19 nt, synthetic construct
  source 1..19: mol_type = other RNA
gtcgagaatatccaagaga

SEQ ID NO: 696 - RNA, 19 nt, synthetic construct
  source 1..19: mol_type = other RNA
tgtcgagaatatccaagag

SEQ ID NO: 697 - RNA, 19 nt, synthetic construct
  source 1..19: mol_type = other RNA
gtgtcgagaatatccaaga

SEQ ID NO: 698 - RNA, 19 nt, synthetic construct
  source 1..19: mol_type = other RNA
tgtgtcgagaatatccaag

SEQ ID NO: 699 - RNA, 19 nt, synthetic construct
  source 1..19: mol_type = other RNA
tccctcattgcactgtact

SEQ ID NO: 700 - RNA, 19 nt, synthetic construct
  source 1..19: mol_type = other RNA
gtccctcattgcactgtac

SEQ ID NO: 701 - RNA, 19 nt, synthetic construct
  source 1..19: mol_type = other RNA
ggtccctcattgcactgta

SEQ ID NO: 702 - RNA, 19 nt, synthetic construct
  source 1..19: mol_type = other RNA
tggtccctcattgcactgt

SEQ ID NO: 703 - RNA, 19 nt, synthetic construct
  source 1..19: mol_type = other RNA
ctggtccctcattgcactg

SEQ ID NO: 704 - RNA, 19 nt, synthetic construct
  source 1..19: mol_type = other RNA
actggtccctcattgcact

SEQ ID NO: 705 - RNA, 19 nt, synthetic construct
  source 1..19: mol_type = other RNA
tactggtccctcattgcac

SEQ ID NO: 706 - RNA, 19 nt, synthetic construct
  source 1..19: mol_type = other RNA
gtactggtccctcattgca

SEQ ID NO: 707 - RNA, 19 nt, synthetic construct
  source 1..19: mol_type = other RNA
tgtactggtccctcattgc

SEQ ID NO: 708 - RNA, 19 nt, synthetic construct
  source 1..19: mol_type = other RNA
atgtactggtccctcattg

SEQ ID NO: 709 - RNA, 19 nt, synthetic construct
  source 1..19: mol_type = other RNA
catgtactggtccctcatt

SEQ ID NO: 710 - RNA, 19 nt, synthetic construct
  source 1..19: mol_type = other RNA
tcatgtactggtccctcat

SEQ ID NO: 711 - RNA, 19 nt, synthetic construct
  source 1..19: mol_type = other RNA
ctcatgtactggtccctca

SEQ ID NO: 712 - RNA, 19 nt, synthetic construct
  source 1..19: mol_type = other RNA
cctcatgtactggtccctc

SEQ ID NO: 713 - RNA, 19 nt, synthetic construct
  source 1..19: mol_type = other RNA
tcctcatgtactggtccct

SEQ ID NO: 714 - RNA, 19 nt, synthetic construct
  source 1..19: mol_type = other RNA
gtcctcatgtactggtccc

SEQ ID NO: 715 - RNA, 19 nt, synthetic construct
  source 1..19: mol_type = other RNA
agtcctcatgtactggtcc

SEQ ID NO: 716 - RNA, 19 nt, synthetic construct
  source 1..19: mol_type = other RNA
cagtcctcatgtactggtc

SEQ ID NO: 717 - RNA, 19 nt, synthetic construct
  source 1..19: mol_type = other RNA
ccagtcctcatgtactggt

SEQ ID NO: 718 - RNA, 19 nt, synthetic construct
  source 1..19: mol_type = other RNA
cccagtcctcatgtactgg

SEQ ID NO: 719 - RNA, 19 nt, synthetic construct
  source 1..19: mol_type = other RNA
ccccagtcctcatgtactg

SEQ ID NO: 720 - RNA, 19 nt, synthetic construct
  source 1..19: mol_type = other RNA
tccccagtcctcatgtact

SEQ ID NO: 721 - RNA, 19 nt, synthetic construct
  source 1..19: mol_type = other RNA
ctccccagtcctcatgtac

SEQ ID NO: 722 - RNA, 19 nt, synthetic construct
  source 1..19: mol_type = other RNA
cctccccagtcctcatgta

SEQ ID NO: 723 - RNA, 19 nt, synthetic construct
  source 1..19: mol_type = other RNA
ccctccccagtcctcatgt

SEQ ID NO: 724 - RNA, 19 nt, synthetic construct
  source 1..19: mol_type = other RNA
gccctccccagtcctcatg

SEQ ID NO: 725 - RNA, 19 nt, synthetic construct
  source 1..19: mol_type = other RNA
agccctccccagtcctcat

SEQ ID NO: 726 - RNA, 19 nt, synthetic construct
  source 1..19: mol_type = other RNA
aagccctccccagtcctca

SEQ ID NO: 727 - RNA, 19 nt, synthetic construct
  source 1..19: mol_type = other RNA
aaagccctccccagtcctc

SEQ ID NO: 728 - RNA, 19 nt, synthetic construct
  source 1..19: mol_type = other RNA
gaaagccctccccagtcct

SEQ ID NO: 729 - RNA, 19 nt, synthetic construct
  source 1..19: mol_type = other RNA
agaaagccctccccagtcc

SEQ ID NO: 730 - RNA, 19 nt, synthetic construct
  source 1..19: mol_type = other RNA
aagaaagccctccccagtc

SEQ ID NO: 731 - RNA, 19 nt, synthetic construct
  source 1..19: mol_type = other RNA
aaagaaagccctccccagt

SEQ ID NO: 732 - RNA, 19 nt, synthetic construct
  source 1..19: mol_type = other RNA
caaagaaagccctccccag

SEQ ID NO: 733 - RNA, 19 nt, synthetic construct
  source 1..19: mol_type = other RNA
acaaagaaagccctcccca

SEQ ID NO: 734 - RNA, 19 nt, synthetic construct
  source 1..19: mol_type = other RNA
ttagtattatttatggcaa

SEQ ID NO: 735 - RNA, 19 nt, synthetic construct
  source 1..19: mol_type = other RNA
tttagtattatttatggca

SEQ ID NO: 736 - RNA, 19 nt, synthetic construct
  source 1..19: mol_type = other RNA
atttagtattatttatggc

SEQ ID NO: 737 - RNA, 19 nt, synthetic construct
  source 1..19: mol_type = other RNA
gatttagtattatttatgg

SEQ ID NO: 738 - RNA, 19 nt, synthetic construct
  source 1..19: mol_type = other RNA
tgatttagtattatttatg

SEQ ID NO: 739 - RNA, 19 nt, synthetic construct
  source 1..19: mol_type = other RNA
atgatttagtattatttat

SEQ ID NO: 740 - RNA, 19 nt, synthetic construct
  source 1..19: mol_type = other RNA
aatgatttagtattattta

SEQ ID NO: 741 - RNA, 19 nt, synthetic construct
  source 1..19: mol_type = other RNA
aaatgatttagtattattt

SEQ ID NO: 742 - RNA, 19 nt, synthetic construct
  source 1..19: mol_type = other RNA
caaatgatttagtattatt

SEQ ID NO: 743 - RNA, 19 nt, synthetic construct
  source 1..19: mol_type = other RNA
tcaaatgatttagtattat

SEQ ID NO: 744 - RNA, 19 nt, synthetic construct
  source 1..19: mol_type = other RNA
ttcaaatgatttagtatta

SEQ ID NO: 745 - RNA, 19 nt, synthetic construct
  source 1..19: mol_type = other RNA
cttcaaatgatttagtatt

SEQ ID NO: 746 - RNA, 19 nt, synthetic construct
  source 1..19: mol_type = other RNA
tcttcaaatgatttagtat

SEQ ID NO: 747 - RNA, 19 nt, synthetic construct
  source 1..19: mol_type = other RNA
atcttcaaatgatttagta

SEQ ID NO: 748 - RNA, 19 nt, synthetic construct
  source 1..19: mol_type = other RNA
tatcttcaaatgatttagt

SEQ ID NO: 749 - RNA, 19 nt, synthetic construct
  source 1..19: mol_type = other RNA
atatcttcaaatgatttag

SEQ ID NO: 750 - RNA, 19 nt, synthetic construct
  source 1..19: mol_type = other RNA
aatatcttcaaatgattta

SEQ ID NO: 751 - RNA, 19 nt, synthetic construct
  source 1..19: mol_type = other RNA
gaatatcttcaaatgattt

SEQ ID NO: 752 - RNA, 19 nt, synthetic construct
  source 1..19: mol_type = other RNA
tgaatatcttcaaatgatt

SEQ ID NO: 753 - RNA, 19 nt, synthetic construct
  source 1..19: mol_type = other RNA
ggtgaatatcttcaaatga

SEQ ID NO: 754 - RNA, 19 nt, synthetic construct
  source 1..19: mol_type = other RNA
tggtgaatatcttcaaatg

SEQ ID NO: 755 - RNA, 19 nt, synthetic construct
  source 1..19: mol_type = other RNA
atggtgaatatcttcaaat

SEQ ID NO: 756 - RNA, 19 nt, synthetic construct
  source 1..19: mol_type = other RNA
aatggtgaatatcttcaaa

SEQ ID NO: 757 - RNA, 19 nt, synthetic construct
  source 1..19: mol_type = other RNA
taatggtgaatatcttcaa

SEQ ID NO: 758 - RNA, 19 nt, synthetic construct
  source 1..19: mol_type = other RNA
actcttttaatttgttctc

SEQ ID NO: 759 - RNA, 19 nt, synthetic construct
  source 1..19: mol_type = other RNA
aactcttttaatttgttct

SEQ ID NO: 760 - RNA, 19 nt, synthetic construct
  source 1..19: mol_type = other RNA
taactcttttaatttgttc

SEQ ID NO: 761 - RNA, 19 nt, synthetic construct
  source 1..19: mol_type = other RNA
ttaactcttttaatttgtt

SEQ ID NO: 762 - RNA, 19 nt, synthetic construct
  source 1..19: mol_type = other RNA
cttaactcttttaatttgt

SEQ ID NO: 763 - RNA, 19 nt, synthetic construct
  source 1..19: mol_type = other RNA
ccttaactcttttaatttg

SEQ ID NO: 764 - RNA, 19 nt, synthetic construct
  source 1..19: mol_type = other RNA
tccttaactcttttaattt

SEQ ID NO: 765 - RNA, 19 nt, synthetic construct
  source 1..19: mol_type = other RNA
gtccttaactcttttaatt

SEQ ID NO: 766 - RNA, 19 nt, synthetic construct
  source 1..19: mol_type = other RNA
agtccttaactcttttaat

SEQ ID NO: 767 - RNA, 19 nt, synthetic construct
  source 1..19: mol_type = other RNA
gagtccttaactcttttaa

SEQ ID NO: 768 - RNA, 19 nt, synthetic construct
  source 1..19: mol_type = other RNA
agagtccttaactctttta

SEQ ID NO: 769 - RNA, 19 nt, synthetic construct
  source 1..19: mol_type = other RNA
cagagtccttaactctttt

SEQ ID NO: 770 - RNA, 19 nt, synthetic construct
  source 1..19: mol_type = other RNA
tcagagtccttaactcttt

SEQ ID NO: 771 - RNA, 19 nt, synthetic construct
  source 1..19: mol_type = other RNA
ttcagagtccttaactctt

SEQ ID NO: 772 - RNA, 19 nt, synthetic construct
  source 1..19: mol_type = other RNA
tcttcagagtccttaactc

SEQ ID NO: 773 - RNA, 19 nt, synthetic construct
  source 1..19: mol_type = other RNA
atcttcagagtccttaact

SEQ ID NO: 774 - RNA, 19 nt, synthetic construct
  source 1..19: mol_type = other RNA
catcttcagagtccttaac

SEQ ID NO: 775 - RNA, 19 nt, synthetic construct
  source 1..19: mol_type = other RNA
acatcttcagagtccttaa

SEQ ID NO: 776 - RNA, 19 nt, synthetic construct
  source 1..19: mol_type = other RNA
gtacatcttcagagtcctt

SEQ ID NO: 777 - RNA, 19 nt, synthetic construct
  source 1..19: mol_type = other RNA
ggtacatcttcagagtcct

SEQ ID NO: 778 - RNA, 19 nt, synthetic construct
  source 1..19: mol_type = other RNA
aggtacatcttcagagtcc

SEQ ID NO: 779 - RNA, 19 nt, synthetic construct
  source 1..19: mol_type = other RNA
taggtacatcttcagagtc

SEQ ID NO: 780 - RNA, 19 nt, synthetic construct
  source 1..19: mol_type = other RNA
ataggtacatcttcagagt

SEQ ID NO: 781 - RNA, 19 nt, synthetic construct
  source 1..19: mol_type = other RNA
cataggtacatcttcagag

SEQ ID NO: 782 - RNA, 19 nt, synthetic construct
  source 1..19: mol_type = other RNA
ccataggtacatcttcaga

SEQ ID NO: 783 - RNA, 19 nt, synthetic construct
  source 1..19: mol_type = other RNA
accataggtacatcttcag

SEQ ID NO: 784 - RNA, 19 nt, synthetic construct
  source 1..19: mol_type = other RNA
gaccataggtacatcttca

SEQ ID NO: 785 - RNA, 19 nt, synthetic construct
  source 1..19: mol_type = other RNA
aatcacatttatttcctac

SEQ ID NO: 786 - RNA, 19 nt, synthetic construct
  source 1..19: mol_type = other RNA
aaatcacatttatttccta

SEQ ID NO: 787 - RNA, 19 nt, synthetic construct
  source 1..19: mol_type = other RNA
caaatcacatttatttcct

SEQ ID NO: 788 - RNA, 19 nt, synthetic construct
  source 1..19: mol_type = other RNA
gcaaatcacatttatttcc

SEQ ID NO: 789 - RNA, 19 nt, synthetic construct
  source 1..19: mol_type = other RNA
ggcaaatcacatttatttc

SEQ ID NO: 790 - RNA, 19 nt, synthetic construct
  source 1..19: mol_type = other RNA
aggcaaatcacatttattt

SEQ ID NO: 791 - RNA, 19 nt, synthetic construct
  source 1..19: mol_type = other RNA
aaggcaaatcacatttatt

SEQ ID NO: 792 - RNA, 19 nt, synthetic construct
  source 1..19: mol_type = other RNA
gaaggcaaatcacatttat

SEQ ID NO: 793 - RNA, 19 nt, synthetic construct
  source 1..19: mol_type = other RNA
agaaggcaaatcacattta

SEQ ID NO: 794 - RNA, 19 nt, synthetic construct
  source 1..19: mol_type = other RNA
tagaaggcaaatcacattt

SEQ ID NO: 795 - RNA, 19 nt, synthetic construct
  source 1..19: mol_type = other RNA
ctagaaggcaaatcacatt

SEQ ID NO: 796 - RNA, 19 nt, synthetic construct
  source 1..19: mol_type = other RNA
tctagaaggcaaatcacat

SEQ ID NO: 797 - RNA, 19 nt, synthetic construct
  source 1..19: mol_type = other RNA
ttctagaaggcaaatcaca

SEQ ID NO: 798 - RNA, 19 nt, synthetic construct
  source 1..19: mol_type = other RNA
gttctagaaggcaaatcac

SEQ ID NO: 799 - RNA, 19 nt, synthetic construct
  source 1..19: mol_type = other RNA
tgttctagaaggcaaatca

SEQ ID NO: 800 - RNA, 19 nt, synthetic construct
  source 1..19: mol_type = other RNA
ctgttctagaaggcaaatc

SEQ ID NO: 801 - RNA, 19 nt, synthetic construct
  source 1..19: mol_type = other RNA
actgttctagaaggcaaat

SEQ ID NO: 802 - RNA, 19 nt, synthetic construct
  source 1..19: mol_type = other RNA
tactgttctagaaggcaaa

SEQ ID NO: 803 - RNA, 19 nt, synthetic construct
  source 1..19: mol_type = other RNA
tctactgttctagaaggca

SEQ ID NO: 804 - RNA, 19 nt, synthetic construct
  source 1..19: mol_type = other RNA
gtctactgttctagaaggc

SEQ ID NO: 805 - RNA, 19 nt, synthetic construct
  source 1..19: mol_type = other RNA
tgtctactgttctagaagg

SEQ ID NO: 806 - RNA, 19 nt, synthetic construct
  source 1..19: mol_type = other RNA
gtgtctactgttctagaag

SEQ ID NO: 807 - RNA, 19 nt, synthetic construct
  source 1..19: mol_type = other RNA
tgtgtctactgttctagaa

SEQ ID NO: 808 - RNA, 19 nt, synthetic construct
  source 1..19: mol_type = other RNA
ttgtgtctactgttctaga

SEQ ID NO: 809 - RNA, 19 nt, synthetic construct
  source 1..19: mol_type = other RNA
tttgtgtctactgttctag

SEQ ID NO: 810 - RNA, 19 nt, synthetic construct
  source 1..19: mol_type = other RNA
ttttgtgtctactgttcta

SEQ ID NO: 811 - RNA, 19 nt, synthetic construct
  source 1..19: mol_type = other RNA
gttttgtgtctactgttct

SEQ ID NO: 812 - RNA, 19 nt, synthetic construct
  source 1..19: mol_type = other RNA
tgttttgtgtctactgttc

SEQ ID NO: 813 - RNA, 19 nt, synthetic construct
  source 1..19: mol_type = other RNA
ctgttttgtgtctactgtt

SEQ ID NO: 814 - RNA, 19 nt, synthetic construct
  source 1..19: mol_type = other RNA
cctgttttgtgtctactgt

SEQ ID NO: 815 - RNA, 19 nt, synthetic construct
  source 1..19: mol_type = other RNA
gcctgttttgtgtctactg

SEQ ID NO: 816 - RNA, 19 nt, synthetic construct
  source 1..19: mol_type = other RNA
agcctgttttgtgtctact

SEQ ID NO: 817 - RNA, 19 nt, synthetic construct
  source 1..19: mol_type = other RNA
gagcctgttttgtgtctac

SEQ ID NO: 818 - RNA, 19 nt, synthetic construct
  source 1..19: mol_type = other RNA
tgagcctgttttgtgtcta

SEQ ID NO: 819 - RNA, 19 nt, synthetic construct
  source 1..19: mol_type = other RNA
ctgagcctgttttgtgtct

SEQ ID NO: 820 - RNA, 19 nt, synthetic construct
  source 1..19: mol_type = other RNA
cctgagcctgttttgtgtc

SEQ ID NO: 821 - RNA, 19 nt, synthetic construct
  source 1..19: mol_type = other RNA
tcctgagcctgttttgtgt

SEQ ID NO: 822 - RNA, 19 nt, synthetic construct
  source 1..19: mol_type = other RNA
gtcctgagcctgttttgtg

SEQ ID NO: 823 - RNA, 19 nt, synthetic construct
  source 1..19: mol_type = other RNA
agtcctgagcctgttttgt

SEQ ID NO: 824 - RNA, 19 nt, synthetic construct
  source 1..19: mol_type = other RNA
aagtcctgagcctgttttg

SEQ ID NO: 825 - RNA, 19 nt, synthetic construct
  source 1..19: mol_type = other RNA
taagtcctgagcctgtttt

SEQ ID NO: 826 - RNA, 19 nt, synthetic construct
  source 1..19: mol_type = other RNA
ctaagtcctgagcctgttt

SEQ ID NO: 827 - RNA, 19 nt, synthetic construct
  source 1..19: mol_type = other RNA
gctaagtcctgagcctgtt

SEQ ID NO: 828 - RNA, 19 nt, synthetic construct
  source 1..19: mol_type = other RNA
tgctaagtcctgagcctgt

SEQ ID NO: 829 - RNA, 19 nt, synthetic construct
  source 1..19: mol_type = other RNA
ttgctaagtcctgagcctg

SEQ ID NO: 830 - RNA, 19 nt, synthetic construct
  source 1..19: mol_type = other RNA
cttgctaagtcctgagcct

SEQ ID NO: 831 - RNA, 19 nt, synthetic construct
  source 1..19: mol_type = other RNA
tcttgctaagtcctgagcc

SEQ ID NO: 832 - RNA, 19 nt, synthetic construct
  source 1..19: mol_type = other RNA
ttcttgctaagtcctgagc

SEQ ID NO: 833 - RNA, 19 nt, synthetic construct
  source 1..19: mol_type = other RNA
cttcttgctaagtcctgag

SEQ ID NO: 834 - RNA, 19 nt, synthetic construct
  source 1..19: mol_type = other RNA
acttcttgctaagtcctga

SEQ ID NO: 835 - RNA, 19 nt, synthetic construct
  source 1..19: mol_type = other RNA
aacttcttgctaagtcctg

SEQ ID NO: 836 - RNA, 19 nt, synthetic construct
  source 1..19: mol_type = other RNA
taacttcttgctaagtcct

SEQ ID NO: 837 - RNA, 19 nt, synthetic construct
  source 1..19: mol_type = other RNA
ataacttcttgctaagtcc

SEQ ID NO: 838 - RNA, 19 nt, synthetic construct
  source 1..19: mol_type = other RNA
cataacttcttgctaagtc

SEQ ID NO: 839 - RNA, 19 nt, synthetic construct
  source 1..19: mol_type = other RNA
ccataacttcttgctaagt

SEQ ID NO: 840 - RNA, 19 nt, synthetic construct
  source 1..19: mol_type = other RNA
tccataacttcttgctaag

SEQ ID NO: 841 - RNA, 19 nt, synthetic construct
  source 1..19: mol_type = other RNA
ttccataacttcttgctaa

SEQ ID NO: 842 - RNA, 19 nt, synthetic construct
  source 1..19: mol_type = other RNA
attccataacttcttgcta

SEQ ID NO: 843 - RNA, 19 nt, synthetic construct
  source 1..19: mol_type = other RNA
aattccataacttcttgct

SEQ ID NO: 844 - RNA, 19 nt, synthetic construct
  source 1..19: mol_type = other RNA
gaattccataacttcttgc

SEQ ID NO: 845 - RNA, 19 nt, synthetic construct
  source 1..19: mol_type = other RNA
ggaattccataacttcttg

SEQ ID NO: 846 - RNA, 19 nt, synthetic construct
  source 1..19: mol_type = other RNA
aggaattccataacttctt

SEQ ID NO: 847 - RNA, 19 nt, synthetic construct
  source 1..19: mol_type = other RNA
aaggaattccataacttct

SEQ ID NO: 848 - RNA, 19 nt, synthetic construct
  source 1..19: mol_type = other RNA
aaaggaattccataacttc

SEQ ID NO: 849 - RNA, 19 nt, synthetic construct
  source 1..19: mol_type = other RNA
aaaaggaattccataactt

SEQ ID NO: 850 - RNA, 19 nt, synthetic construct
  source 1..19: mol_type = other RNA
taaaaggaattccataact

SEQ ID NO: 851 - RNA, 19 nt, synthetic construct
  source 1..19: mol_type = other RNA
ataaaaggaattccataac

SEQ ID NO: 852 - RNA, 19 nt, synthetic construct
  source 1..19: mol_type = other RNA
aataaaaggaattccataa

SEQ ID NO: 853 - RNA, 19 nt, synthetic construct
  source 1..19: mol_type = other RNA
caataaaaggaattccata

SEQ ID NO: 854 - RNA, 19 nt, synthetic construct
  source 1..19: mol_type = other RNA
tcaataaaaggaattccat

SEQ ID NO: 855 - RNA, 21 nt, synthetic construct
  modified_base 20..21: mod_base = OTHER; note = thymine
  modified_base 1: mod_base = OTHER; note = guanosine
  modified_base 2: mod_base = OTHER; note = guanosine
  modified_base 3: mod_base = OTHER; note = adenosine
  modified_base 4: mod_base = cm
  modified_base 5: mod_base = OTHER; note = guanosine
  modified_base 6: mod_base = OTHER; note = adenosine
  modified_base 7: mod_base = OTHER; note = adenosine
  modified_base 8: mod_base = um
  modified_base 9: mod_base = OTHER; note = adenosine
  modified_base 10: mod_base = um
  modified_base 11: mod_base = OTHER; note = guanosine
  modified_base 12: mod_base = OTHER; note = adenosine
  modified_base 13: mod_base = um
  modified_base 14: mod_base = cm
  modified_base 15: mod_base = cm
  modified_base 16: mod_base = OTHER; note = adenosine
  modified_base 17: mod_base = OTHER; note = adenosine
  modified_base 18: mod_base = cm
  modified_base 19: mod_base = OTHER; note = adenosine
  modified_base 20: mod_base = OTHER; note = 2'-deoxythymidine
  modified_base 21: mod_base = OTHER; note = 2'-deoxythymidine
  source 1..21: mol_type = other RNA
ggacgaatatgatccaacatt

SEQ ID NO: 856 - RNA, 21 nt, synthetic construct
  modified_base 20..21: mod_base = OTHER; note = thymine
  modified_base 1: mod_base = OTHER; note = guanosine
  modified_base 2: mod_base = OTHER; note = adenosine
  modified_base 3: mod_base = cm
  modified_base 4: mod_base = OTHER; note = guanosine
  modified_base 5: mod_base = OTHER; note = adenosine
  modified_base 6: mod_base = OTHER; note = adenosine
  modified_base 7: mod_base = um
  modified_base 8: mod_base = OTHER; note = adenosine
  modified_base 9: mod_base = um
  modified_base 10: mod_base = OTHER; note = guanosine
  modified_base 11: mod_base = OTHER; note = adenosine
  modified_base 12: mod_base = um
  modified_base 13: mod_base = cm
  modified_base 14: mod_base = cm
  modified_base 15: mod_base = OTHER; note = adenosine
  modified_base 16: mod_base = OTHER; note = adenosine
  modified_base 17: mod_base = cm
  modified_base 18: mod_base = OTHER; note = adenosine
  modified_base 19: mod_base = OTHER; note = adenosine
  modified_base 20: mod_base = OTHER; note = 2'-deoxythymidine
  modified_base 21: mod_base = OTHER; note = 2'-deoxythymidine
  source 1..21: mol_type = other RNA
gacgaatatgatccaacaatt

SEQ ID NO: 857 - RNA, 21 nt, synthetic construct
  modified_base 20..21: mod_base = OTHER; note = thymine
  modified_base 1: mod_base = OTHER; note = adenosine
  modified_base 2: mod_base = cm
  modified_base 3: mod_base = OTHER; note = guanosine
  modified_base 4: mod_base = OTHER; note = adenosine
  modified_base 5: mod_base = OTHER; note = adenosine
  modified_base 6: mod_base = um
  modified_base 7: mod_base = OTHER; note = adenosine
  modified_base 8: mod_base = um
  modified_base 9: mod_base = OTHER; note = guanosine
  modified_base 10: mod_base = OTHER; note = adenosine
  modified_base 11: mod_base = um
  modified_base 12: mod_base = cm
  modified_base 13: mod_base = cm
  modified_base 14: mod_base = OTHER; note = adenosine
  modified_base 15: mod_base = OTHER; note = adenosine
  modified_base 16: mod_base = cm
  modified_base 17: mod_base = OTHER; note = adenosine
  modified_base 18: mod_base = OTHER; note = adenosine
  modified_base 19: mod_base = um
  modified_base 20: mod_base = OTHER; note = 2'-deoxythymidine
  modified_base 21: mod_base = OTHER; note = 2'-deoxythymidine
  source 1..21: mol_type = other RNA
acgaatatgatccaacaattt

SEQ ID NO: 858 - RNA, 21 nt, synthetic construct
  modified_base 20..21: mod_base = OTHER; note = thymine
  modified_base 1: mod_base = cm
  modified_base 2: mod_base = OTHER; note = guanosine
  modified_base 3: mod_base = OTHER; note = adenosine
  modified_base 4: mod_base = OTHER; note = adenosine
  modified_base 5: mod_base = um
  modified_base 6: mod_base = OTHER; note = adenosine
  modified_base 7: mod_base = um
  modified_base 8: mod_base = OTHER; note = guanosine
  modified_base 9: mod_base = OTHER; note = adenosine
  modified_base 10: mod_base = um
  modified_base 11: mod_base = cm
  modified_base 12: mod_base = cm
  modified_base 13: mod_base = OTHER; note = adenosine
  modified_base 14: mod_base = OTHER; note = adenosine
  modified_base 15: mod_base = cm
  modified_base 16: mod_base = OTHER; note = adenosine
  modified_base 17: mod_base = OTHER; note = adenosine
  modified_base 18: mod_base = um
  modified_base 19: mod_base = OTHER; note = adenosine
  modified_base 20: mod_base = OTHER; note = 2'-deoxythymidine
  modified_base 21: mod_base = OTHER; note = 2'-deoxythymidine
  source 1..21: mol_type = other RNA
cgaatatgatccaacaatatt

SEQ ID NO: 859 - RNA, 21 nt, synthetic construct
  modified_base 20..21: mod_base = OTHER; note = thymine
  modified_base 1: mod_base = OTHER; note = guanosine
  modified_base 2: mod_base = OTHER; note = adenosine
  modified_base 3: mod_base = OTHER; note = adenosine
  modified_base 4: mod_base = um
  modified_base 5: mod_base = OTHER; note = adenosine
  modified_base 6: mod_base = um
  modified_base 7: mod_base = OTHER; note = guanosine
  modified_base 8: mod_base = OTHER; note = adenosine
  modified_base 9: mod_base = um
  modified_base 10: mod_base = cm
  modified_base 11: mod_base = cm
  modified_base 12: mod_base = OTHER; note = adenosine
  modified_base 13: mod_base = OTHER; note = adenosine
  modified_base 14: mod_base = cm
  modified_base 15: mod_base = OTHER; note = adenosine
  modified_base 16: mod_base = OTHER; note = adenosine
  modified_base 17: mod_base = um
  modified_base 18: mod_base = OTHER; note = adenosine
  modified_base 19: mod_base = OTHER; note = guanosine
  modified_base 20: mod_base = OTHER; note = 2'-deoxythymidine
  modified_base 21: mod_base = OTHER; note = 2'-deoxythymidine
  source 1..21: mol_type = other RNA
gaatatgatccaacaatagtt

SEQ ID NO: 860 - RNA, 21 nt, synthetic construct
  modified_base 20..21: mod_base = OTHER; note = thymine
  modified_base 1: mod_base = OTHER; note = adenosine
  modified_base 2: mod_base = OTHER; note = adenosine
  modified_base 3: mod_base = um
  modified_base 4: mod_base = OTHER; note = adenosine
  modified_base 5: mod_base = um
  modified_base 6: mod_base = OTHER; note = guanosine
  modified_base 7: mod_base = OTHER; note = adenosine
  modified_base 8: mod_base = um
  modified_base 9: mod_base = cm
  modified_base 10: mod_base = cm
  modified_base 11: mod_base = OTHER; note = adenosine
  modified_base 12: mod_base = OTHER; note = adenosine
  modified_base 13: mod_base = cm
  modified_base 14: mod_base = OTHER; note = adenosine
  modified_base 15: mod_base = OTHER; note = adenosine
  modified_base 16: mod_base = um
  modified_base 17: mod_base = OTHER; note = adenosine
  modified_base 18: mod_base = OTHER; note = guanosine
  modified_base 19: mod_base = OTHER; note = adenosine
  modified_base 20: mod_base = OTHER; note = 2'-deoxythymidine
  modified_base 21: mod_base = OTHER; note = 2'-deoxythymidine
  source 1..21: mol_type = other RNA
aatatgatccaacaatagatt

SEQ ID NO: 861 - RNA, 21 nt, synthetic construct
  modified_base 20..21: mod_base = OTHER; note = thymine
  modified_base 1: mod_base = OTHER; note = adenosine
  modified_base 2: mod_base = um
  modified_base 3: mod_base = OTHER; note = adenosine
  modified_base 4: mod_base = um
  modified_base 5: mod_base = OTHER; note = guanosine
  modified_base 6: mod_base = OTHER; note = adenosine
  modified_base 7: mod_base = um
  modified_base 8: mod_base = cm
  modified_base 9: mod_base = cm
  modified_base 10: mod_base = OTHER; note = adenosine
  modified_base 11: mod_base = OTHER; note = adenosine
  modified_base 12: mod_base = cm
  modified_base 13: mod_base = OTHER; note = adenosine
  modified_base 14: mod_base = OTHER; note = adenosine
  modified_base 15: mod_base = um
  modified_base 16: mod_base = OTHER; note = adenosine
  modified_base 17: mod_base = OTHER; note = guanosine
  modified_base 18: mod_base = OTHER; note = adenosine
  modified_base 19: mod_base = OTHER; note = guanosine
  modified_base 20: mod_base = OTHER; note = 2'-deoxythymidine
  modified_base 21: mod_base = OTHER; note = 2'-deoxythymidine
  source 1..21: mol_type = other RNA
atatgatccaacaatagagtt

SEQ ID NO: 862 - RNA, 21 nt, synthetic construct
  modified_base 20..21: mod_base = OTHER; note = thymine
  modified_base 1: mod_base = um
  modified_base 2: mod_base = OTHER; note = adenosine
  modified_base 3: mod_base = um
  modified_base 4: mod_base = OTHER; note = guanosine
  modified_base 5: mod_base = OTHER; note = adenosine
  modified_base 6: mod_base = um
  modified_base 7: mod_base = cm
  modified_base 8: mod_base = cm
  modified_base 9: mod_base = OTHER; note = adenosine
  modified_base 10: mod_base = OTHER; note = adenosine
  modified_base 11: mod_base = cm
  modified_base 12: mod_base = OTHER; note = adenosine
  modified_base 13: mod_base = OTHER; note = adenosine
  modified_base 14: mod_base = um
  modified_base 15: mod_base = OTHER; note = adenosine
  modified_base 16: mod_base = OTHER; note = guanosine
  modified_base 17: mod_base = OTHER; note = adenosine
  modified_base 18: mod_base = OTHER; note = guanosine
  modified_base 19: mod_base = OTHER; note = guanosine
  modified_base 20: mod_base = OTHER; note = 2'-deoxythymidine
  modified_base 21: mod_base = OTHER; note = 2'-deoxythymidine
  source 1..21: mol_type = other RNA
tatgatccaacaatagaggtt

SEQ ID NO: 863 - RNA, 21 nt, synthetic construct
  modified_base 20..21: mod_base = OTHER; note = thymine
  modified_base 1: mod_base = OTHER; note = adenosine
  modified_base 2: mod_base = um
  modified_base 3: mod_base = OTHER; note = guanosine
  modified_base 4: mod_base = OTHER; note = adenosine
  modified_base 5: mod_base = um
  modified_base 6: mod_base = cm
  modified_base 7: mod_base = cm
  modified_base 8: mod_base = OTHER; note = adenosine
  modified_base 9: mod_base = OTHER; note = adenosine
  modified_base 10: mod_base = cm
  modified_base 11: mod_base = OTHER; note = adenosine
  modified_base 12: mod_base = OTHER; note = adenosine
  modified_base 13: mod_base = um
  modified_base 14: mod_base = OTHER; note = adenosine
  modified_base 15: mod_base = OTHER; note = guanosine
  modified_base 16: mod_base = OTHER; note = adenosine
  modified_base 17: mod_base = OTHER; note = guanosine
  modified_base 18: mod_base = OTHER; note = guanosine
  modified_base 19: mod_base = OTHER; note = adenosine
  modified_base 20: mod_base = OTHER; note = 2'-deoxythymidine
  modified_base 21: mod_base = OTHER; note = 2'-deoxythymidine
  source 1..21: mol_type = other RNA
atgatccaacaatagaggatt

SEQ ID NO: 864 - RNA, 21 nt, synthetic construct
  modified_base 20..21: mod_base = OTHER; note = thymine
  modified_base 1: mod_base = um
  modified_base 2: mod_base = OTHER; note = guanosine
  modified_base 3: mod_base = OTHER; note = adenosine
  modified_base 4: mod_base = um
  modified_base 5: mod_base = cm
  modified_base 6: mod_base = cm
  modified_base 7: mod_base = OTHER; note = adenosine
  modified_base 8: mod_base = OTHER; note = adenosine
  modified_base 9: mod_base = cm
  modified_base 10: mod_base = OTHER; note = adenosine
  modified_base 11: mod_base = OTHER; note = adenosine
  modified_base 12: mod_base = um
  modified_base 13: mod_base = OTHER; note = adenosine
  modified_base 14: mod_base = OTHER; note = guanosine
  modified_base 15: mod_base = OTHER; note = adenosine
  modified_base 16: mod_base = OTHER; note = guanosine
  modified_base 17: mod_base = OTHER; note = guanosine
  modified_base 18: mod_base = OTHER; note = adenosine
  modified_base 19: mod_base = um
  modified_base 20: mod_base = OTHER; note = 2'-deoxythymidine
  modified_base 21: mod_base = OTHER; note = 2'-deoxythymidine
  source 1..21: mol_type = other RNA
tgatccaacaatagaggattt

SEQ ID NO: 865 - RNA, 21 nt, synthetic construct
  modified_base 20..21: mod_base = OTHER; note = thymine
  modified_base 1: mod_base = OTHER; note = guanosine
  modified_base 2: mod_base = OTHER; note = adenosine
  modified_base 3: mod_base = um
  modified_base 4: mod_base = cm
  modified_base 5: mod_base = cm
  modified_base 6: mod_base = OTHER; note = adenosine
  modified_base 7: mod_base = OTHER; note = adenosine
  modified_base 8: mod_base = cm
  modified_base 9: mod_base = OTHER; note = adenosine
  modified_base 10: mod_base = OTHER; note = adenosine
  modified_base 11: mod_base = um
  modified_base 12: mod_base = OTHER; note = adenosine
  modified_base 13: mod_base = OTHER; note = guanosine
  modified_base 14: mod_base = OTHER; note = adenosine
  modified_base 15: mod_base = OTHER; note = guanosine
  modified_base 16: mod_base = OTHER; note = guanosine
  modified_base 17: mod_base = OTHER; note = adenosine
  modified_base 18: mod_base = um
  modified_base 19: mod_base = um
  modified_base 20: mod_base = OTHER; note = 2'-deoxythymidine
  modified_base 21: mod_base = OTHER; note = 2'-deoxythymidine
  source 1..21: mol_type = other RNA
gatccaacaatagaggatttt

SEQ ID NO: 866 - RNA, 21 nt, synthetic construct
  modified_base 20..21: mod_base = OTHER; note = thymine
  modified_base 1: mod_base = OTHER; note = adenosine
  modified_base 2: mod_base = um
  modified_base 3: mod_base = cm
  modified_base 4: mod_base = cm
  modified_base 5: mod_base = OTHER; note = adenosine
  modified_base 6: mod_base = OTHER; note = adenosine
  modified_base 7: mod_base = cm
  modified_base 8: mod_base = OTHER; note = adenosine
  modified_base 9: mod_base = OTHER; note = adenosine
  modified_base 10: mod_base = um
  modified_base 11: mod_base = OTHER; note = adenosine
  modified_base 12: mod_base = OTHER; note = guanosine
  modified_base 13: mod_base = OTHER; note = adenosine
  modified_base 14: mod_base = OTHER; note = guanosine
  modified_base 15: mod_base = OTHER; note = guanosine
  modified_base 16: mod_base = OTHER; note = adenosine
  modified_base 17: mod_base = um
  modified_base 18: mod_base = um
  modified_base 19: mod_base = cm
  modified_base 20: mod_base = OTHER; note = 2'-deoxythymidine
  modified_base 21: mod_base = OTHER; note = 2'-deoxythymidine
  source 1..21: mol_type = other RNA
atccaacaatagaggattctt

SEQ ID NO: 867 - RNA, 21 nt, synthetic construct
  modified_base 20..21: mod_base = OTHER; note = thymine
  modified_base 1: mod_base = um
  modified_base 2: mod_base = cm
  modified_base 3: mod_base = cm
  modified_base 4: mod_base = OTHER; note = adenosine
  modified_base 5: mod_base = OTHER; note = adenosine
  modified_base 6: mod_base = cm
  modified_base 7: mod_base = OTHER; note = adenosine
  modified_base 8: mod_base = OTHER; note = adenosine
  modified_base 9: mod_base = um
  modified_base 10: mod_base = OTHER; note = adenosine
  modified_base 11: mod_base = OTHER; note = guanosine
  modified_base 12: mod_base = OTHER; note = adenosine
  modified_base 13: mod_base = OTHER; note = guanosine
  modified_base 14: mod_base = OTHER; note = guanosine
  modified_base 15: mod_base = OTHER; note = adenosine
  modified_base 16: mod_base = um
  modified_base 17: mod_base = um
  modified_base 18: mod_base = cm
  modified_base 19: mod_base = cm
  modified_base 20: mod_base = OTHER; note = 2'-deoxythymidine
  modified_base 21: mod_base = OTHER; note = 2'-deoxythymidine
  source 1..21: mol_type = other RNA
tccaacaatagaggattcctt

SEQ ID NO: 868 - RNA, 21 nt, synthetic construct
  modified_base 20..21: mod_base = OTHER; note = thymine
  modified_base 1: mod_base = cm
  modified_base 2: mod_base = cm
  modified_base 3: mod_base = OTHER; note = adenosine
  modified_base 4: mod_base = OTHER; note = adenosine
  modified_base 5: mod_base = cm
  modified_base 6: mod_base = OTHER; note = adenosine
  modified_base 7: mod_base = OTHER; note = adenosine
  modified_base 8: mod_base = um
  modified_base 9: mod_base = OTHER; note = adenosine
  modified_base 10: mod_base = OTHER; note = guanosine
  modified_base 11: mod_base = OTHER; note = adenosine
  modified_base 12: mod_base = OTHER; note = guanosine
  modified_base 13: mod_base = OTHER; note = guanosine
  modified_base 14: mod_base = OTHER; note = adenosine
  modified_base 15: mod_base = um
  modified_base 16: mod_base = um
  modified_base 17: mod_base = cm
  modified_base 18: mod_base = cm
  modified_base 19: mod_base = um
  modified_base 20: mod_base = OTHER; note = 2'-deoxythymidine
  modified_base 21: mod_base = OTHER; note = 2'-deoxythymidine
  source 1..21: mol_type = other RNA
ccaacaatagaggattccttt

SEQ ID NO: 869 - RNA, 21 nt, synthetic construct
  modified_base 20..21: mod_base = OTHER; note = thymine
  modified_base 1: mod_base = cm
  modified_base 2: mod_base = OTHER; note = adenosine
  modified_base 3: mod_base = OTHER; note = adenosine
  modified_base 4: mod_base = cm
  modified_base 5: mod_base = OTHER; note = adenosine
  modified_base 6: mod_base = OTHER; note = adenosine
  modified_base 7: mod_base = um
  modified_base 8: mod_base = OTHER; note = adenosine
  modified_base 9: mod_base = OTHER; note = guanosine
  modified_base 10: mod_base = OTHER; note = adenosine
  modified_base 11: mod_base = OTHER; note = guanosine
  modified_base 12: mod_base = OTHER; note = guanosine
  modified_base 13: mod_base = OTHER; note = adenosine
  modified_base 14: mod_base = um
  modified_base 15: mod_base = um
  modified_base 16: mod_base = cm
  modified_base 17: mod_base = cm
  modified_base 18: mod_base = um
  modified_base 19: mod_base = OTHER; note = adenosine
  modified_base 20: mod_base = OTHER; note = 2'-deoxythymidine
  modified_base 21: mod_base = OTHER; note = 2'-deoxythymidine
  source 1..21: mol_type = other RNA
caacaatagaggattcctatt

SEQ ID NO: 870 - RNA, 21 nt, synthetic construct
  modified_base 20..21: mod_base = OTHER; note = thymine
  modified_base 1: mod_base = OTHER; note = adenosine
  modified_base 2: mod_base = OTHER; note = adenosine
  modified_base 3: mod_base = cm
  modified_base 4: mod_base = OTHER; note = adenosine
  modified_base 5: mod_base = OTHER; note = adenosine
  modified_base 6: mod_base = um
  modified_base 7: mod_base = OTHER; note = adenosine
  modified_base 8: mod_base = OTHER; note = guanosine
  modified_base 9: mod_base = OTHER; note = adenosine
  modified_base 10: mod_base = OTHER; note = guanosine
  modified_base 11: mod_base = OTHER; note = guanosine
  modified_base 12: mod_base = OTHER; note = adenosine
  modified_base 13: mod_base = um
  modified_base 14: mod_base = um
  modified_base 15: mod_base = cm
  modified_base 16: mod_base = cm
  modified_base 17: mod_base = um
  modified_base 18: mod_base = OTHER; note = adenosine
  modified_base 19: mod_base = cm
  modified_base 20: mod_base = OTHER; note = 2'-deoxythymidine
  modified_base 21: mod_base = OTHER; note = 2'-deoxythymidine
  source 1..21: mol_type = other RNA
aacaatagaggattcctactt

SEQ ID NO: 871 - RNA, 21 nt, synthetic construct
  modified_base 20..21: mod_base = OTHER; note = thymine
  modified_base 1: mod_base = OTHER; note = adenosine
  modified_base 2: mod_base = cm
  modified_base 3: mod_base = OTHER; note = adenosine
  modified_base 4: mod_base = OTHER; note = adenosine
  modified_base 5: mod_base = um
  modified_base 6: mod_base = OTHER; note = adenosine
  modified_base 7: mod_base = OTHER; note = guanosine
  modified_base 8: mod_base = OTHER; note = adenosine
  modified_base 9: mod_base = OTHER; note = guanosine
  modified_base 10: mod_base = OTHER; note = guanosine
  modified_base 11: mod_base = OTHER; note = adenosine
  modified_base 12: mod_base = um
  modified_base 13: mod_base = um
  modified_base 14: mod_base = cm
  modified_base 15: mod_base = cm
  modified_base 16: mod_base = um
  modified_base 17: mod_base = OTHER; note = adenosine
  modified_base 18: mod_base = cm
  modified_base 19: mod_base = OTHER; note = adenosine
  modified_base 20: mod_base = OTHER; note = 2'-deoxythymidine
  modified_base 21: mod_base = OTHER; note = 2'-deoxythymidine
  source 1..21: mol_type = other RNA
acaatagaggattcctacatt

SEQ ID NO: 872 - RNA, 21 nt, synthetic construct
  modified_base 20..21: mod_base = OTHER; note = thymine
  modified_base 1: mod_base = cm
  modified_base 2: mod_base = OTHER; note = adenosine
  modified_base 3: mod_base = OTHER; note = adenosine
  modified_base 4: mod_base = um
  modified_base 5: mod_base = OTHER; note = adenosine
  modified_base 6: mod_base = OTHER; note = guanosine
  modified_base 7: mod_base = OTHER; note = adenosine
  modified_base 8: mod_base = OTHER; note = guanosine
  modified_base 9: mod_base = OTHER; note = guanosine
  modified_base 10: mod_base = OTHER; note = adenosine
  modified_base 11: mod_base = um
  modified_base 12: mod_base = um
  modified_base 13: mod_base = cm
  modified_base 14: mod_base = cm
  modified_base 15: mod_base = um
  modified_base 16: mod_base = OTHER; note = adenosine
  modified_base 17: mod_base = cm
  modified_base 18: mod_base = OTHER; note = adenosine
  modified_base 19: mod_base = OTHER; note = guanosine
  modified_base 20: mod_base = OTHER; note = 2'-deoxythymidine
  modified_base 21: mod_base = OTHER; note = 2'-deoxythymidine
  source 1..21: mol_type = other RNA
caatagaggattcctacagtt

SEQ ID NO: 873 - RNA, 21 nt, synthetic construct
  modified_base 20..21: mod_base = OTHER; note = thymine
  modified_base 1: mod_base = OTHER; note = adenosine
  modified_base 2: mod_base = OTHER; note = adenosine
  modified_base 3: mod_base = um
  modified_base 4: mod_base = OTHER; note = adenosine
  modified_base 5: mod_base = OTHER; note = guanosine
  modified_base 6: mod_base = OTHER; note = adenosine
  modified_base 7: mod_base = OTHER; note = guanosine
  modified_base 8: mod_base = OTHER; note = guanosine
  modified_base 9: mod_base = OTHER; note = adenosine
  modified_base 10: mod_base = um
  modified_base 11: mod_base = um
  modified_base 12: mod_base = cm
  modified_base 13: mod_base = cm
  modified_base 14: mod_base = um
  modified_base 15: mod_base = OTHER; note = adenosine
  modified_base 16: mod_base = cm
  modified_base 17: mod_base = OTHER; note = adenosine
  modified_base 18: mod_base = OTHER; note = guanosine
  modified_base 19: mod_base = OTHER; note = guanosine
  modified_base 20: mod_base = OTHER; note = 2'-deoxythymidine
  modified_base 21: mod_base = OTHER; note = 2'-deoxythymidine
  source 1..21: mol_type = other RNA
aatagaggattcctacaggtt

SEQ ID NO: 874 - RNA, 21 nt, synthetic construct
  modified_base 20..21: mod_base = OTHER; note = thymine
  modified_base 1: mod_base = OTHER; note = adenosine
  modified_base 2: mod_base = um
  modified_base 3: mod_base = OTHER; note = adenosine
  modified_base 4: mod_base = OTHER; note = guanosine
  modified_base 5: mod_base = OTHER; note = adenosine
  modified_base 6: mod_base = OTHER; note = guanosine
  modified_base 7: mod_base = OTHER; note = guanosine
  modified_base 8: mod_base = OTHER; note = adenosine
  modified_base 9: mod_base = um
  modified_base 10: mod_base = um
  modified_base 11: mod_base = cm
  modified_base 12: mod_base = cm
  modified_base 13: mod_base = um
  modified_base 14: mod_base = OTHER; note = adenosine
  modified_base 15: mod_base = cm
  modified_base 16: mod_base = OTHER; note = adenosine
  modified_base 17: mod_base = OTHER; note = guanosine
  modified_base 18: mod_base = OTHER; note = guanosine
  modified_base 19: mod_base = OTHER; note = adenosine
  modified_base 20: mod_base = OTHER; note = 2'-deoxythymidine
  modified_base 21: mod_base = OTHER; note = 2'-deoxythymidine
  source 1..21: mol_type = other RNA
atagaggattcctacaggatt

SEQ ID NO: 875 - RNA, 21 nt, synthetic construct
  modified_base 20..21: mod_base = OTHER; note = thymine
  modified_base 1: mod_base = um
  modified_base 2: mod_base = OTHER; note = adenosine
  modified_base 3: mod_base = OTHER; note = guanosine
  modified_base 4: mod_base = OTHER; note = adenosine
  modified_base 5: mod_base = OTHER; note = guanosine
  modified_base 6: mod_base = OTHER; note = guanosine
  modified_base 7: mod_base = OTHER; note = adenosine
  modified_base 8: mod_base = um
  modified_base 9: mod_base = um
  modified_base 10: mod_base = cm
  modified_base 11: mod_base = cm
  modified_base 12: mod_base = um
  modified_base 13: mod_base = OTHER; note = adenosine
  modified_base 14: mod_base = cm
  modified_base 15: mod_base = OTHER; note = adenosine
  modified_base 16: mod_base = OTHER; note = guanosine
  modified_base 17: mod_base = OTHER; note = guanosine
  modified_base 18: mod_base = OTHER; note = adenosine
  modified_base 19: mod_base = OTHER; note = adenosine
  modified_base 20: mod_base = OTHER; note = 2'-deoxythymidine
  modified_base 21: mod_base = OTHER; note = 2'-deoxythymidine
  source 1..21: mol_type = other RNA
tagaggattcctacaggaatt

SEQ ID NO: 876 - RNA, 21 nt, synthetic construct
  modified_base 20..21: mod_base = OTHER; note = thymine
  modified_base 1: mod_base = OTHER; note = adenosine
  modified_base 2: mod_base = OTHER; note = guanosine
  modified_base 3: mod_base = OTHER; note = adenosine
  modified_base 4: mod_base = OTHER; note = guanosine
  modified_base 5: mod_base = OTHER; note = guanosine
  modified_base 6: mod_base = OTHER; note = adenosine
  modified_base 7: mod_base = um
  modified_base 8: mod_base = um
  modified_base 9: mod_base = cm
  modified_base 10: mod_base = cm
  modified_base 11: mod_base = um
  modified_base 12: mod_base = OTHER; note = adenosine
  modified_base 13: mod_base = cm
  modified_base 14: mod_base = OTHER; note = adenosine
  modified_base 15: mod_base = OTHER; note = guanosine
  modified_base 16: mod_base = OTHER; note = guanosine
  modified_base 17: mod_base = OTHER; note = adenosine
  modified_base 18: mod_base = OTHER; note = adenosine
  modified_base 19: mod_base = OTHER; note = guanosine
  modified_base 20: mod_base = OTHER; note = 2'-deoxythymidine
  modified_base 21: mod_base = OTHER; note = 2'-deoxythymidine
  source 1..21: mol_type = other RNA
agaggattcctacaggaagtt

SEQ ID NO: 877 - RNA, 21 nt, synthetic construct
  modified_base 20..21: mod_base = OTHER; note = thymine
  modified_base 1: mod_base = OTHER; note = guanosine
  modified_base 2: mod_base = OTHER; note = adenosine
  modified_base 3: mod_base = OTHER; note = guanosine
  modified_base 4: mod_base = OTHER; note = guanosine
  modified_base 5: mod_base = OTHER; note = adenosine
  modified_base 6: mod_base = um
  modified_base 7: mod_base = um
  modified_base 8: mod_base = cm
  modified_base 9: mod_base = cm
  modified_base 10: mod_base = um
  modified_base 11: mod_base = OTHER; note = adenosine
  modified_base 12: mod_base = cm
  modified_base 13: mod_base = OTHER; note = adenosine
  modified_base 14: mod_base = OTHER; note = guanosine
  modified_base 15: mod_base = OTHER; note = guanosine
  modified_base 16: mod_base = OTHER; note = adenosine
  modified_base 17: mod_base = OTHER; note = adenosine
  modified_base 18: mod_base = OTHER; note = guanosine
  modified_base 19: mod_base = cm
  modified_base 20: mod_base = OTHER; note = 2'-deoxythymidine
  modified_base 21: mod_base = OTHER; note = 2'-deoxythymidine
  source 1..21: mol_type = other RNA
gaggattcctacaggaagctt

SEQ ID NO: 878 - RNA, 21 nt, synthetic construct
  modified_base 20..21: mod_base = OTHER; note = thymine
  modified_base 1: mod_base = OTHER; note = adenosine
  modified_base 2: mod_base = OTHER; note = guanosine
  modified_base 3: mod_base = OTHER; note = guanosine
  modified_base 4: mod_base = OTHER; note = adenosine
  modified_base 5: mod_base = um
  modified_base 6: mod_base = um
  modified_base 7: mod_base = cm
  modified_base 8: mod_base = cm
  modified_base 9: mod_base = um
  modified_base 10: mod_base = OTHER; note = adenosine
  modified_base 11: mod_base = cm
  modified_base 12: mod_base = OTHER; note = adenosine
  modified_base 13: mod_base = OTHER; note = guanosine
  modified_base 14: mod_base = OTHER; note = guanosine
  modified_base 15: mod_base = OTHER; note = adenosine
  modified_base 16: mod_base = OTHER; note = adenosine
  modified_base 17: mod_base = OTHER; note = guanosine
  modified_base 18: mod_base = cm
  modified_base 19: mod_base = OTHER; note = adenosine
  modified_base 20: mod_base = OTHER; note = 2'-deoxythymidine
  modified_base 21: mod_base = OTHER; note = 2'-deoxythymidine
  source 1..21: mol_type = other RNA
aggattcctacaggaagcatt

SEQ ID NO: 879 - RNA, 21 nt, synthetic construct
  modified_base 20..21: mod_base = OTHER; note = thymine
  modified_base 1: mod_base = OTHER; note = guanosine
  modified_base 2: mod_base = OTHER; note = guanosine
  modified_base 3: mod_base = OTHER; note = adenosine
  modified_base 4: mod_base = um
  modified_base 5: mod_base = um
  modified_base 6: mod_base = cm
  modified_base 7: mod_base = cm
  modified_base 8: mod_base = um
  modified_base 9: mod_base = OTHER; note = adenosine
  modified_base 10: mod_base = cm
  modified_base 11: mod_base = OTHER; note = adenosine
  modified_base 12: mod_base = OTHER; note = guanosine
  modified_base 13: mod_base = OTHER; note = guanosine
  modified_base 14: mod_base = OTHER; note = adenosine
  modified_base 15: mod_base = OTHER; note = adenosine
  modified_base 16: mod_base = OTHER; note = guanosine
  modified_base 17: mod_base = cm
  modified_base 18: mod_base = OTHER; note = adenosine
  modified_base 19: mod_base = OTHER; note = adenosine
  modified_base 20: mod_base = OTHER; note = 2'-deoxythymidine
  modified_base 21: mod_base = OTHER; note = 2'-deoxythymidine
  source 1..21: mol_type = other RNA
ggattcctacaggaagcaatt

SEQ ID NO: 880 - RNA, 21 nt, synthetic construct
  modified_base 20..21: mod_base = OTHER; note = thymine
  modified_base 1: mod_base = OTHER; note = guanosine
  modified_base 2: mod_base = OTHER; note = adenosine
  modified_base 3: mod_base = um
  modified_base 4: mod_base = um
  modified_base 5: mod_base = cm
  modified_base 6: mod_base = cm
  modified_base 7: mod_base = um
  modified_base 8: mod_base = OTHER; note = adenosine
  modified_base 9: mod_base = cm
  modified_base 10: mod_base = OTHER; note = adenosine
  modified_base 11: mod_base = OTHER; note = guanosine
  modified_base 12: mod_base = OTHER; note = guanosine
  modified_base 13: mod_base = OTHER; note = adenosine
  modified_base 14: mod_base = OTHER; note = adenosine
  modified_base 15: mod_base = OTHER; note = guanosine
  modified_base 16: mod_base = cm
  modified_base 17: mod_base = OTHER; note = adenosine
  modified_base 18: mod_base = OTHER; note = adenosine
  modified_base 19: mod_base = OTHER; note = guanosine
  modified_base 20: mod_base = OTHER; note = 2'-deoxythymidine
  modified_base 21: mod_base = OTHER; note = 2'-deoxythymidine
  source 1..21: mol_type = other RNA
gattcctacaggaagcaagtt

SEQ ID NO: 881 - RNA, 21 nt, synthetic construct
  modified_base 20..21: mod_base = OTHER; note = thymine
  modified_base 1: mod_base = OTHER; note = adenosine
  modified_base 2: mod_base = um
  modified_base 3: mod_base = um
  modified_base 4: mod_base = cm
  modified_base 5: mod_base = cm
  modified_base 6: mod_base = um
  modified_base 7: mod_base = OTHER; note = adenosine
  modified_base 8: mod_base = cm
  modified_base 9: mod_base = OTHER; note = adenosine
  modified_base 10: mod_base = OTHER; note = guanosine
  modified_base 11: mod_base = OTHER; note = guanosine
  modified_base 12: mod_base = OTHER; note = adenosine
  modified_base 13: mod_base = OTHER; note = adenosine
  modified_base 14: mod_base = OTHER; note = guanosine
  modified_base 15: mod_base = cm
  modified_base 16: mod_base = OTHER; note = adenosine
  modified_base 17: mod_base = OTHER; note = adenosine
  modified_base 18: mod_base = OTHER; note = guanosine
  modified_base 19: mod_base = um
  modified_base 20: mod_base = OTHER; note = 2'-deoxythymidine
  modified_base 21: mod_base = OTHER; note = 2'-deoxythymidine
  source 1..21: mol_type = other RNA
attcctacaggaagcaagttt

SEQ ID NO: 882 - RNA, 21 nt, synthetic construct
  modified_base 20..21: mod_base = OTHER; note = thymine
  modified_base 1: mod_base = um
  modified_base 2: mod_base = um
  modified_base 3: mod_base = cm
  modified_base 4: mod_base = cm
  modified_base 5: mod_base = um
  modified_base 6: mod_base = OTHER; note = adenosine
  modified_base 7: mod_base = cm
  modified_base 8: mod_base = OTHER; note = adenosine
  modified_base 9: mod_base = OTHER; note = guanosine
  modified_base 10: mod_base = OTHER; note = guanosine
  modified_base 11: mod_base = OTHER; note = adenosine
  modified_base 12: mod_base = OTHER; note = adenosine
  modified_base 13: mod_base = OTHER; note = guanosine
  modified_base 14: mod_base = cm
  modified_base 15: mod_base = OTHER; note = adenosine
  modified_base 16: mod_base = OTHER; note = adenosine
  modified_base 17: mod_base = OTHER; note = guanosine
  modified_base 18: mod_base = um
  modified_base 19: mod_base = OTHER; note = adenosine
  modified_base 20: mod_base = OTHER; note = 2'-deoxythymidine
  modified_base 21: mod_base = OTHER; note = 2'-deoxythymidine
  source 1..21: mol_type = other RNA
ttcctacaggaagcaagtatt

SEQ ID NO: 883 - RNA, 21 nt, synthetic construct
  modified_base 20..21: mod_base = OTHER; note = thymine
  modified_base 1: mod_base = um
  modified_base 2: mod_base = cm
  modified_base 3: mod_base = cm
  modified_base 4: mod_base = um
  modified_base 5: mod_base = OTHER; note = adenosine
  modified_base 6: mod_base = cm
  modified_base 7: mod_base = OTHER; note = adenosine
  modified_base 8: mod_base = OTHER; note = guanosine
  modified_base 9: mod_base = OTHER; note = guanosine
  modified_base 10: mod_base = OTHER; note = adenosine
  modified_base 11: mod_base = OTHER; note = adenosine
  modified_base 12: mod_base = OTHER; note = guanosine
  modified_base 13: mod_base = cm
  modified_base 14: mod_base = OTHER; note = adenosine
  modified_base 15: mod_base = OTHER; note = adenosine
  modified_base 16: mod_base = OTHER; note = guanosine
  modified_base 17: mod_base = um
  modified_base 18: mod_base = OTHER; note = adenosine
  modified_base 19: mod_base = OTHER; note = guanosine
  modified_base 20: mod_base = OTHER; note = 2'-deoxythymidine
  modified_base 21: mod_base = OTHER; note = 2'-deoxythymidine
  source 1..21: mol_type = other RNA
tcctacaggaagcaagtagtt

SEQ ID NO: 884 - RNA, 21 nt, synthetic construct
  modified_base 20..21: mod_base = OTHER; note = thymine
  modified_base 1: mod_base = cm
  modified_base 2: mod_base = cm
  modified_base 3: mod_base = um
  modified_base 4: mod_base = OTHER; note = adenosine
  modified_base 5: mod_base = cm
  modified_base 6: mod_base = OTHER; note = adenosine
  modified_base 7: mod_base = OTHER; note = guanosine
  modified_base 8: mod_base = OTHER; note = guanosine
  modified_base 9: mod_base = OTHER; note = adenosine
  modified_base 10: mod_base = OTHER; note = adenosine
  modified_base 11: mod_base = OTHER; note = guanosine
  modified_base 12: mod_base = cm
  modified_base 13: mod_base = OTHER; note = adenosine
  modified_base 14: mod_base = OTHER; note = adenosine
  modified_base 15: mod_base = OTHER; note = guanosine
  modified_base 16: mod_base = um
  modified_base 17: mod_base = OTHER; note = adenosine
  modified_base 18: mod_base = OTHER; note = guanosine
  modified_base 19: mod_base = um
  modified_base 20: mod_base = OTHER; note = 2'-deoxythymidine
  modified_base 21: mod_base = OTHER; note = 2'-deoxythymidine
  source 1..21: mol_type = other RNA
cctacaggaagcaagtagttt

SEQ ID NO: 885 - RNA, 21 nt, synthetic construct
  modified_base 20..21: mod_base = OTHER; note = thymine
  modified_base 1: mod_base = cm
  modified_base 2: mod_base = um
  modified_base 3: mod_base = OTHER; note = adenosine
  modified_base 4: mod_base = cm
  modified_base 5: mod_base = OTHER; note = adenosine
  modified_base 6: mod_base = OTHER; note = guanosine
  modified_base 7: mod_base = OTHER; note = guanosine
  modified_base 8: mod_base = OTHER; note = adenosine
  modified_base 9: mod_base = OTHER; note = adenosine
  modified_base 10: mod_base = OTHER; note = guanosine
  modified_base 11: mod_base = cm
  modified_base 12: mod_base = OTHER; note = adenosine
  modified_base 13: mod_base = OTHER; note = adenosine
  modified_base 14: mod_base = OTHER; note = guanosine
  modified_base 15: mod_base = um
  modified_base 16: mod_base = OTHER; note = adenosine
  modified_base 17: mod_base = OTHER; note = guanosine
  modified_base 18: mod_base = um
  modified_base 19: mod_base = OTHER; note = adenosine
  modified_base 20: mod_base = OTHER; note = 2'-deoxythymidine
  modified_base 21: mod_base = OTHER; note = 2'-deoxythymidine
  source 1..21: mol_type = other RNA
ctacaggaagcaagtagtatt

SEQ ID NO: 886 - RNA, 21 nt, synthetic construct
  modified_base 20..21: mod_base = OTHER; note = thymine
  modified_base 1: mod_base = um
  modified_base 2: mod_base = OTHER; note = adenosine
  modified_base 3: mod_base = cm
  modified_base 4: mod_base = OTHER; note = adenosine
  modified_base 5: mod_base = OTHER; note = guanosine
  modified_base 6: mod_base = OTHER; note = guanosine
  modified_base 7: mod_base = OTHER; note = adenosine
  modified_base 8: mod_base = OTHER; note = adenosine
  modified_base 9: mod_base = OTHER; note = guanosine
  modified_base 10: mod_base = cm
  modified_base 11: mod_base = OTHER; note = adenosine
  modified_base 12: mod_base = OTHER; note = adenosine
  modified_base 13: mod_base = OTHER; note = guanosine
  modified_base 14: mod_base = um
  modified_base 15: mod_base = OTHER; note = adenosine
  modified_base 16: mod_base = OTHER; note = guanosine
  modified_base 17: mod_base = um
  modified_base 18: mod_base = OTHER; note = adenosine
  modified_base 19: mod_base = OTHER; note = adenosine
  modified_base 20: mod_base = OTHER; note = 2'-deoxythymidine
  modified_base 21: mod_base = OTHER; note = 2'-deoxythymidine
  source 1..21: mol_type = other RNA
tacaggaagcaagtagtaatt

SEQ ID NO: 887 - RNA, 21 nt, synthetic construct
  modified_base 20..21: mod_base = OTHER; note = thymine
  modified_base 1: mod_base = OTHER; note = adenosine
  modified_base 2: mod_base = cm
  modified_base 3: mod_base = OTHER; note = adenosine
  modified_base 4: mod_base = OTHER; note = guanosine
  modified_base 5: mod_base = OTHER; note = guanosine
  modified_base 6: mod_base = OTHER; note = adenosine
  modified_base 7: mod_base = OTHER; note = adenosine
  modified_base 8: mod_base = OTHER; note = guanosine
  modified_base 9: mod_base = cm
  modified_base 10: mod_base = OTHER; note = adenosine
  modified_base 11: mod_base = OTHER; note = adenosine
  modified_base 12: mod_base = OTHER; note = guanosine
  modified_base 13: mod_base = um
  modified_base 14: mod_base = OTHER; note = adenosine
  modified_base 15: mod_base = OTHER; note = guanosine
  modified_base 16: mod_base = um
  modified_base 17: mod_base = OTHER; note = adenosine
  modified_base 18: mod_base = OTHER; note = adenosine
  modified_base 19: mod_base = um
  modified_base 20: mod_base = OTHER; note = 2'-deoxythymidine
  modified_base 21: mod_base = OTHER; note = 2'-deoxythymidine
  source 1..21: mol_type = other RNA
acaggaagcaagtagtaattt

SEQ ID NO: 888 - RNA, 21 nt, synthetic construct
  modified_base 20..21: mod_base = OTHER; note = thymine
  modified_base 1: mod_base = cm
  modified_base 2: mod_base = OTHER; note = adenosine
  modified_base 3: mod_base = OTHER; note = guanosine
  modified_base 4: mod_base = OTHER; note = guanosine
  modified_base 5: mod_base = OTHER; note = adenosine
  modified_base 6: mod_base = OTHER; note = adenosine
  modified_base 7: mod_base = OTHER; note = guanosine
  modified_base 8: mod_base = cm
  modified_base 9: mod_base = OTHER; note = adenosine
  modified_base 10: mod_base = OTHER; note = adenosine
  modified_base 11: mod_base = OTHER; note = guanosine
  modified_base 12: mod_base = um
  modified_base 13: mod_base = OTHER; note = adenosine
  modified_base 14: mod_base = OTHER; note = guanosine
  modified_base 15: mod_base = um
  modified_base 16: mod_base = OTHER; note = adenosine
  modified_base 17: mod_base = OTHER; note = adenosine
  modified_base 18: mod_base = um
  modified_base 19: mod_base = um
  modified_base 20: mod_base = OTHER; note = 2'-deoxythymidine
  modified_base 21: mod_base = OTHER; note = 2'-deoxythymidine
  source 1..21: mol_type = other RNA
caggaagcaagtagtaatttt

SEQ ID NO: 889 - RNA, 21 nt, synthetic construct
  modified_base 20..21: mod_base = OTHER; note = thymine
  modified_base 1: mod_base = um
  modified_base 2: mod_base = um
  modified_base 3: mod_base = OTHER; note = guanosine
  modified_base 4: mod_base = OTHER; note = guanosine
  modified_base 5: mod_base = OTHER; note = adenosine
  modified_base 6: mod_base = um
  modified_base 7: mod_base = OTHER; note = adenosine
  modified_base 8: mod_base = um
  modified_base 9: mod_base = um
  modified_base 10: mod_base = cm
  modified_base 11: mod_base = um
  modified_base 12: mod_base = cm
  modified_base 13: mod_base = OTHER; note = guanosine
  modified_base 14: mod_base = OTHER; note = adenosine
  modified_base 15: mod_base = cm
  modified_base 16: mod_base = OTHER; note = adenosine
  modified_base 17: mod_base = cm
  modified_base 18: mod_base = OTHER; note = adenosine
  modified_base 19: mod_base = OTHER; note = guanosine
  modified_base 20: mod_base = OTHER; note = 2'-deoxythymidine
  modified_base 21: mod_base = OTHER; note = 2'-deoxythymidine
  source 1..21: mol_type = other RNA
ttggatattctcgacacagtt

SEQ ID NO: 890 - RNA, 21 nt, synthetic construct
  modified_base 20..21: mod_base = OTHER; note = thymine
  modified_base 1: mod_base = um
  modified_base 2: mod_base = OTHER; note = guanosine
  modified_base 3: mod_base = OTHER; note = guanosine
  modified_base 4: mod_base = OTHER; note = adenosine
  modified_base 5: mod_base = um
  modified_base 6: mod_base = OTHER; note = adenosine
  modified_base 7: mod_base = um
  modified_base 8: mod_base = um
  modified_base 9: mod_base = cm
  modified_base 10: mod_base = um
  modified_base 11: mod_base = cm
  modified_base 12: mod_base = OTHER; note = guanosine
  modified_base 13: mod_base = OTHER; note = adenosine
  modified_base 14: mod_base = cm
  modified_base 15: mod_base = OTHER; note = adenosine
  modified_base 16: mod_base = cm
  modified_base 17: mod_base = OTHER; note = adenosine
  modified_base 18: mod_base = OTHER; note = guanosine
  modified_base 19: mod_base = cm
  modified_base 20: mod_base = OTHER; note = 2'-deoxythymidine
  modified_base 21: mod_base = OTHER; note = 2'-deoxythymidine
  source 1..21: mol_type = other RNA
tggatattctcgacacagctt

SEQ ID NO: 891 - RNA, 21 nt, synthetic construct
  modified_base 20..21: mod_base = OTHER; note = thymine
  modified_base 1: mod_base = OTHER; note = guanosine
  modified_base 2: mod_base = OTHER; note = guanosine
  modified_base 3: mod_base = OTHER; note = adenosine
  modified_base 4: mod_base = um
  modified_base 5: mod_base = OTHER; note = adenosine
  modified_base 6: mod_base = um
  modified_base 7: mod_base = um
  modified_base 8: mod_base = cm
  modified_base 9: mod_base = um
  modified_base 10: mod_base = cm
  modified_base 11: mod_base = OTHER; note = guanosine
  modified_base 12: mod_base = OTHER; note = adenosine
  modified_base 13: mod_base = cm
  modified_base 14: mod_base = OTHER; note = adenosine
  modified_base 15: mod_base = cm
  modified_base 16: mod_base = OTHER; note = adenosine
  modified_base 17: mod_base = OTHER; note = guanosine
  modified_base 18: mod_base = cm
  modified_base 19: mod_base = OTHER; note = adenosine
  modified_base 20: mod_base = OTHER; note = 2'-deoxythymidine
  modified_base 21: mod_base = OTHER; note = 2'-deoxythymidine
  source 1..21: mol_type = other RNA
ggatattctcgacacagcatt

SEQ ID NO: 892 - RNA, 21 nt, synthetic construct
  modified_base 20..21: mod_base = OTHER; note = thymine
  modified_base 1: mod_base = OTHER; note = adenosine
  modified_base 2: mod_base = um
  modified_base 3: mod_base = OTHER; note = adenosine
  modified_base 4: mod_base = um
  modified_base 5: mod_base = um
  modified_base 6: mod_base = cm
  modified_base 7: mod_base = um
  modified_base 8: mod_base = cm
  modified_base 9: mod_base = OTHER; note = guanosine
  modified_base 10: mod_base = OTHER; note = adenosine
  modified_base 11: mod_base = cm
  modified_base 12: mod_base = OTHER; note = adenosine
  modified_base 13: mod_base = cm
  modified_base 14: mod_base = OTHER; note = adenosine
  modified_base 15: mod_base = OTHER; note = guanosine
  modified_base 16: mod_base = cm
  modified_base 17: mod_base = OTHER; note = adenosine
  modified_base 18: mod_base = OTHER; note = guanosine
  modified_base 19: mod_base = OTHER; note = guanosine
  modified_base 20: mod_base = OTHER; note = 2'-deoxythymidine
  modified_base 21: mod_base = OTHER; note = 2'-deoxythymidine
  source 1..21: mol_type = other RNA
atattctcgacacagcaggtt

SEQ ID NO: 893 - RNA, 21 nt, synthetic construct
  modified_base 20..21: mod_base = OTHER; note = thymine
  modified_base 1: mod_base = OTHER; note = adenosine
  modified_base 2: mod_base = um
  modified_base 3: mod_base = um
  modified_base 4: mod_base = cm
  modified_base 5: mod_base = um
  modified_base 6: mod_base = cm
  modified_base 7: mod_base = OTHER; note = guanosine
  modified_base 8: mod_base = OTHER; note = adenosine
  modified_base 9: mod_base = cm
  modified_base 10: mod_base = OTHER; note = adenosine
  modified_base 11: mod_base = cm
  modified_base 12: mod_base = OTHER; note = adenosine
  modified_base 13: mod_base = OTHER; note = guanosine
  modified_base 14: mod_base = cm
  modified_base 15: mod_base = OTHER; note = adenosine
  modified_base 16: mod_base = OTHER; note = guanosine
  modified_base 17: mod_base = OTHER; note = guanosine
  modified_base 18: mod_base = um
  modified_base 19: mod_base = cm
  modified_base 20: mod_base = OTHER; note = 2'-deoxythymidine
  modified_base 21: mod_base = OTHER; note = 2'-deoxythymidine
  source 1..21: mol_type = other RNA
attctcgacacagcaggtctt

SEQ ID NO: 894 - RNA, 21 nt, synthetic construct
  modified_base 20..21: mod_base = OTHER; note = thymine
  modified_base 1: mod_base = um
  modified_base 2: mod_base = cm
  modified_base 3: mod_base = um
  modified_base 4: mod_base = cm
  modified_base 5: mod_base = OTHER; note = guanosine
  modified_base 6: mod_base = OTHER; note = adenosine
  modified_base 7: mod_base = cm
  modified_base 8: mod_base = OTHER; note = adenosine
  modified_base 9: mod_base = cm
  modified_base 10: mod_base = OTHER; note = adenosine
  modified_base 11: mod_base = OTHER; note = guanosine
  modified_base 12: mod_base = cm
  modified_base 13: mod_base = OTHER; note = adenosine
  modified_base 14: mod_base = OTHER; note = guanosine
  modified_base 15: mod_base = OTHER; note = guanosine
  modified_base 16: mod_base = um
  modified_base 17: mod_base = cm
  modified_base 18: mod_base = OTHER; note = adenosine
  modified_base 19: mod_base = OTHER; note = adenosine
  modified_base 20: mod_base = OTHER; note = 2'-deoxythymidine
  modified_base 21: mod_base = OTHER; note = 2'-deoxythymidine
  source 1..21: mol_type = other RNA
tctcgacacagcaggtcaatt

SEQ ID NO: 895 - RNA, 21 nt, synthetic construct
  modified_base 20..21: mod_base = OTHER; note = thymine
  modified_base 1: mod_base = cm
  modified_base 2: mod_base = um
  modified_base 3: mod_base = cm
  modified_base 4: mod_base = OTHER; note = guanosine
  modified_base 5: mod_base = OTHER; note = adenosine
  modified_base 6: mod_base = cm
  modified_base 7: mod_base = OTHER; note = adenosine
  modified_base 8: mod_base = cm
  modified_base 9: mod_base = OTHER; note = adenosine
  modified_base 10: mod_base = OTHER; note = guanosine
  modified_base 11: mod_base = cm
  modified_base 12: mod_base = OTHER; note = adenosine
  modified_base 13: mod_base = OTHER; note = guanosine
  modified_base 14: mod_base = OTHER; note = guanosine
  modified_base 15: mod_base = um
  modified_base 16: mod_base = cm
  modified_base 17: mod_base = OTHER; note = adenosine
  modified_base 18: mod_base = OTHER; note = adenosine
  modified_base 19: mod_base = OTHER; note = guanosine
  modified_base 20: mod_base = OTHER; note = 2'-deoxythymidine
  modified_base 21: mod_base = OTHER; note = 2'-deoxythymidine
  source 1..21: mol_type = other RNA
ctcgacacagcaggtcaagtt

SEQ ID NO: 896 - RNA, 21 nt, synthetic construct
  modified_base 20..21: mod_base = OTHER; note = thymine
  modified_base 1: mod_base = um
  modified_base 2: mod_base = cm
  modified_base 3: mod_base = OTHER; note = guanosine
  modified_base 4: mod_base = OTHER; note = adenosine
  modified_base 5: mod_base = cm
  modified_base 6: mod_base = OTHER; note = adenosine
  modified_base 7: mod_base = cm
  modified_base 8: mod_base = OTHER; note = adenosine
  modified_base 9: mod_base = OTHER; note = guanosine
  modified_base 10: mod_base = cm
  modified_base 11: mod_base = OTHER; note = adenosine
  modified_base 12: mod_base = OTHER; note = guanosine
  modified_base 13: mod_base = OTHER; note = guanosine
  modified_base 14: mod_base = um
  modified_base 15: mod_base = cm
  modified_base 16: mod_base = OTHER; note = adenosine
  modified_base 17: mod_base = OTHER; note = adenosine
  modified_base 18: mod_base = OTHER; note = guanosine
  modified_base 19: mod_base = OTHER; note = adenosine
  modified_base 20: mod_base = OTHER; note = 2'-deoxythymidine
  modified_base 21: mod_base = OTHER; note = 2'-deoxythymidine
  source 1..21: mol_type = other RNA
tcgacacagcaggtcaagatt

SEQ ID NO: 897 - RNA, 21 nt, synthetic construct
  modified_base 20..21: mod_base = OTHER; note = thymine
  modified_base 1: mod_base = cm
  modified_base 2: mod_base = OTHER; note = guanosine
  modified_base 3: mod_base = OTHER; note = adenosine
  modified_base 4: mod_base = cm
  modified_base 5: mod_base = OTHER; note = adenosine
  modified_base 6: mod_base = cm
  modified_base 7: mod_base = OTHER; note = adenosine
  modified_base 8: mod_base = OTHER; note = guanosine
  modified_base 9: mod_base = cm
  modified_base 10: mod_base = OTHER; note = adenosine
  modified_base 11: mod_base = OTHER; note = guanosine
  modified_base 12: mod_base = OTHER; note = guanosine
  modified_base 13: mod_base = um
  modified_base 14: mod_base = cm
  modified_base 15: mod_base = OTHER; note = adenosine
  modified_base 16: mod_base = OTHER; note = adenosine
  modified_base 17: mod_base = OTHER; note = guanosine
  modified_base 18: mod_base = OTHER; note = adenosine
  modified_base 19: mod_base = OTHER; note = guanosine
  modified_base 20: mod_base = OTHER; note = 2'-deoxythymidine
  modified_base 21: mod_base = OTHER; note = 2'-deoxythymidine
  source 1..21: mol_type = other RNA
cgacacagcaggtcaagagtt

SEQ ID NO: 898 - RNA, 21 nt, synthetic construct
  modified_base 20..21: mod_base = OTHER; note = thymine
  modified_base 1: mod_base = OTHER; note = guanosine
  modified_base 2: mod_base = OTHER; note = adenosine
  modified_base 3: mod_base = cm
  modified_base 4: mod_base = OTHER; note = adenosine
  modified_base 5: mod_base = cm
  modified_base 6: mod_base = OTHER; note = adenosine
  modified_base 7: mod_base = OTHER; note = guanosine
  modified_base 8: mod_base = cm
  modified_base 9: mod_base = OTHER; note = adenosine
  modified_base 10: mod_base = OTHER; note = guanosine
  modified_base 11: mod_base = OTHER; note = guanosine
  modified_base 12: mod_base = um
  modified_base 13: mod_base = cm
  modified_base 14: mod_base = OTHER; note = adenosine
  modified_base 15: mod_base = OTHER; note = adenosine
  modified_base 16: mod_base = OTHER; note = guanosine
  modified_base 17: mod_base = OTHER; note = adenosine
  modified_base 18: mod_base = OTHER; note = guanosine
  modified_base 19: mod_base = OTHER; note = guanosine
  modified_base 20: mod_base = OTHER; note = 2'-deoxythymidine
  modified_base 21: mod_base = OTHER; note = 2'-deoxythymidine
  source 1..21: mol_type = other RNA
gacacagcaggtcaagaggtt

SEQ ID NO: 899 - RNA, 21 nt, synthetic construct
  modified_base 20..21: mod_base = OTHER; note = thymine
  modified_base 1: mod_base = OTHER; note = adenosine
  modified_base 2: mod_base = cm
  modified_base 3: mod_base = OTHER; note = adenosine
  modified_base 4: mod_base = cm
  modified_base 5: mod_base = OTHER; note = adenosine
  modified_base 6: mod_base = OTHER; note = guanosine
  modified_base 7: mod_base = cm
  modified_base 8: mod_base = OTHER; note = adenosine
  modified_base 9: mod_base = OTHER; note = guanosine
  modified_base 10: mod_base = OTHER; note = guanosine
  modified_base 11: mod_base = um
  modified_base 12: mod_base = cm
  modified_base 13: mod_base = OTHER; note = adenosine
  modified_base 14: mod_base = OTHER; note = adenosine
  modified_base 15: mod_base = OTHER; note = guanosine
  modified_base 16: mod_base = OTHER; note = adenosine
  modified_base 17: mod_base = OTHER; note = guanosine
  modified_base 18: mod_base = OTHER; note = guanosine
  modified_base 19: mod_base = OTHER; note = adenosine
  modified_base 20: mod_base = OTHER; note = 2'-deoxythymidine
  modified_base 21: mod_base = OTHER; note = 2'-deoxythymidine
  source 1..21: mol_type = other RNA
acacagcaggtcaagaggatt

SEQ ID NO: 900 - RNA, 21 nt, synthetic construct
  modified_base 20..21: mod_base = OTHER; note = thymine
  modified_base 1: mod_base = cm
  modified_base 2: mod_base = OTHER; note = adenosine
  modified_base 3: mod_base = cm
  modified_base 4: mod_base = OTHER; note = adenosine
  modified_base 5: mod_base = OTHER; note = guanosine
  modified_base 6: mod_base = cm
  modified_base 7: mod_base = OTHER; note = adenosine
  modified_base 8: mod_base = OTHER; note = guanosine
  modified_base 9: mod_base = OTHER; note = guanosine
  modified_base 10: mod_base = um
  modified_base 11: mod_base = cm
  modified_base 12: mod_base = OTHER; note = adenosine
  modified_base 13: mod_base = OTHER; note = adenosine
  modified_base 14: mod_base = OTHER; note = guanosine
  modified_base 15: mod_base = OTHER; note = adenosine
  modified_base 16: mod_base = OTHER; note = guanosine
  modified_base 17: mod_base = OTHER; note = guanosine
  modified_base 18: mod_base = OTHER; note = adenosine
  modified_base 19: mod_base = OTHER; note = guanosine
  modified_base 20: mod_base = OTHER; note = 2'-deoxythymidine
  modified_base 21: mod_base = OTHER; note = 2'-deoxythymidine
  source 1..21: mol_type = other RNA
cacagcaggtcaagaggagtt

SEQ ID NO: 901 - RNA, 21 nt, synthetic construct
  modified_base 20..21: mod_base = OTHER; note = thymine
  modified_base 1: mod_base = OTHER; note = adenosine
  modified_base 2: mod_base = cm
  modified_base 3: mod_base = OTHER; note = adenosine
  modified_base 4: mod_base = OTHER; note = guanosine
  modified_base 5: mod_base = cm
  modified_base 6: mod_base = OTHER; note = adenosine
  modified_base 7: mod_base = OTHER; note = guanosine
  modified_base 8: mod_base = OTHER; note = guanosine
  modified_base 9: mod_base = um
  modified_base 10: mod_base = cm
  modified_base 11: mod_base = OTHER; note = adenosine
  modified_base 12: mod_base = OTHER; note = adenosine
  modified_base 13: mod_base = OTHER; note = guanosine
  modified_base 14: mod_base = OTHER; note = adenosine
  modified_base 15: mod_base = OTHER; note = guanosine
  modified_base 16: mod_base = OTHER; note = guanosine
  modified_base 17: mod_base = OTHER; note = adenosine
  modified_base 18: mod_base = OTHER; note = guanosine
  modified_base 19: mod_base = um
  modified_base 20: mod_base = OTHER; note = 2'-deoxythymidine
  modified_base 21: mod_base = OTHER; note = 2'-deoxythymidine
  source 1..21: mol_type = other RNA
acagcaggtcaagaggagttt

SEQ ID NO: 902 - RNA, 21 nt, synthetic construct
  modified_base 20..21: mod_base = OTHER; note = thymine
  modified_base 1: mod_base = cm
  modified_base 2: mod_base = OTHER; note = adenosine
  modified_base 3: mod_base = OTHER; note = guanosine
  modified_base 4: mod_base = cm
  modified_base 5: mod_base = OTHER; note = adenosine
  modified_base 6: mod_base = OTHER; note = guanosine
  modified_base 7: mod_base = OTHER; note = guanosine
  modified_base 8: mod_base = um
  modified_base 9: mod_base = cm
  modified_base 10: mod_base = OTHER; note = adenosine
  modified_base 11: mod_base = OTHER; note = adenosine
  modified_base 12: mod_base = OTHER; note = guanosine
  modified_base 13: mod_base = OTHER; note = adenosine
  modified_base 14: mod_base = OTHER; note = guanosine
  modified_base 15: mod_base = OTHER; note = guanosine
  modified_base 16: mod_base = OTHER; note = adenosine
  modified_base 17: mod_base = OTHER; note = guanosine
  modified_base 18: mod_base = um
  modified_base 19: mod_base = OTHER; note = adenosine
  modified_base 20: mod_base = OTHER; note = 2'-deoxythymidine
  modified_base 21: mod_base = OTHER; note = 2'-deoxythymidine
  source 1..21: mol_type = other RNA
cagcaggtcaagaggagtatt

SEQ ID NO: 903 - RNA, 21 nt, synthetic construct
  modified_base 20..21: mod_base = OTHER; note = thymine
  modified_base 1: mod_base = OTHER; note = adenosine
  modified_base 2: mod_base = OTHER; note = guanosine
  modified_base 3: mod_base = cm
  modified_base 4: mod_base = OTHER; note = adenosine
  modified_base 5: mod_base = OTHER; note = guanosine
  modified_base 6: mod_base = OTHER; note = guanosine
  modified_base 7: mod_base = um
  modified_base 8: mod_base = cm
  modified_base 9: mod_base = OTHER; note = adenosine
  modified_base 10: mod_base = OTHER; note = adenosine
  modified_base 11: mod_base = OTHER; note = guanosine
  modified_base 12: mod_base = OTHER; note = adenosine
  modified_base 13: mod_base = OTHER; note = guanosine
  modified_base 14: mod_base = OTHER; note = guanosine
  modified_base 15: mod_base = OTHER; note = adenosine
  modified_base 16: mod_base = OTHER; note = guanosine
  modified_base 17: mod_base = um
  modified_base 18: mod_base = OTHER; note = adenosine
  modified_base 19: mod_base = cm
  modified_base 20: mod_base = OTHER; note = 2'-deoxythymidine
  modified_base 21: mod_base = OTHER; note = 2'-deoxythymidine
  source 1..21: mol_type = other RNA
agcaggtcaagaggagtactt

SEQ ID NO: 904 - RNA, 21 nt, synthetic construct
  modified_base 20..21: mod_base = OTHER; note = thymine
  modified_base 1: mod_base = OTHER; note = guanosine
  modified_base 2: mod_base = cm
  modified_base 3: mod_base = OTHER; note = adenosine
  modified_base 4: mod_base = OTHER; note = guanosine
  modified_base 5: mod_base = OTHER; note = guanosine
  modified_base 6: mod_base = um
  modified_base 7: mod_base = cm
  modified_base 8: mod_base = OTHER; note = adenosine
  modified_base 9: mod_base = OTHER; note = adenosine
  modified_base 10: mod_base = OTHER; note = guanosine
  modified_base 11: mod_base = OTHER; note = adenosine
  modified_base 12: mod_base = OTHER; note = guanosine
  modified_base 13: mod_base = OTHER; note = guanosine
  modified_base 14: mod_base = OTHER; note = adenosine
  modified_base 15: mod_base = OTHER; note = guanosine
  modified_base 16: mod_base = um
  modified_base 17: mod_base = OTHER; note = adenosine
  modified_base 18: mod_base = cm
  modified_base 19: mod_base = OTHER; note = adenosine
  modified_base 20: mod_base = OTHER; note = 2'-deoxythymidine
  modified_base 21: mod_base = OTHER; note = 2'-deoxythymidine
  source 1..21: mol_type = other RNA
gcaggtcaagaggagtacatt

SEQ ID NO: 905 - RNA, 21 nt, synthetic construct
  modified_base 20..21: mod_base = OTHER; note = thymine
  modified_base 1: mod_base = cm
  modified_base 2: mod_base = OTHER; note = adenosine
  modified_base 3: mod_base = OTHER; note = guanosine
  modified_base 4: mod_base = OTHER; note = guanosine
  modified_base 5: mod_base = um
  modified_base 6: mod_base = cm
  modified_base 7: mod_base = OTHER; note = adenosine
  modified_base 8: mod_base = OTHER; note = adenosine
  modified_base 9: mod_base = OTHER; note = guanosine
  modified_base 10: mod_base = OTHER; note = adenosine
  modified_base 11: mod_base = OTHER; note = guanosine
  modified_base 12: mod_base = OTHER; note = guanosine
  modified_base 13: mod_base = OTHER; note = adenosine
  modified_base 14: mod_base = OTHER; note = guanosine
  modified_base 15: mod_base = um
  modified_base 16: mod_base = OTHER; note = adenosine
  modified_base 17: mod_base = cm
  modified_base 18: mod_base = OTHER; note = adenosine
  modified_base 19: mod_base = OTHER; note = guanosine
  modified_base 20: mod_base = OTHER; note = 2'-deoxythymidine
  modified_base 21: mod_base = OTHER; note = 2'-deoxythymidine
  source 1..21: mol_type = other RNA
caggtcaagaggagtacagtt

SEQ ID NO: 906 - RNA, 21 nt, synthetic construct
  modified_base 20..21: mod_base = OTHER; note = thymine
  modified_base 1: mod_base = OTHER; note = adenosine
  modified_base 2: mod_base = OTHER; note = guanosine
  modified_base 3: mod_base = OTHER; note = guanosine
  modified_base 4: mod_base = um
  modified_base 5: mod_base = cm
  modified_base 6: mod_base = OTHER; note = adenosine
  modified_base 7: mod_base = OTHER; note = adenosine
  modified_base 8: mod_base = OTHER; note = guanosine
  modified_base 9: mod_base = OTHER; note = adenosine
  modified_base 10: mod_base = OTHER; note = guanosine
  modified_base 11: mod_base = OTHER; note = guanosine
  modified_base 12: mod_base = OTHER; note = adenosine
  modified_base 13: mod_base = OTHER; note = guanosine
  modified_base 14: mod_base = um
  modified_base 15: mod_base = OTHER; note = adenosine
  modified_base 16: mod_base = cm
  modified_base 17: mod_base = OTHER; note = adenosine
  modified_base 18: mod_base = OTHER; note = guanosine
  modified_base 19: mod_base = um
  modified_base 20: mod_base = OTHER; note = 2'-deoxythymidine
  modified_base 21: mod_base = OTHER; note = 2'-deoxythymidine
  source 1..21: mol_type = other RNA
aggtcaagaggagtacagttt

SEQ ID NO: 907 - RNA, 21 nt, synthetic construct
  modified_base 20..21: mod_base = OTHER; note = thymine
  modified_base 1: mod_base = OTHER; note = guanosine
  modified_base 2: mod_base = OTHER; note = guanosine
  modified_base 3: mod_base = um
  modified_base 4: mod_base = cm
  modified_base 5: mod_base = OTHER; note = adenosine
  modified_base 6: mod_base = OTHER; note = adenosine
  modified_base 7: mod_base = OTHER; note = guanosine
  modified_base 8: mod_base = OTHER; note = adenosine
  modified_base 9: mod_base = OTHER; note = guanosine
  modified_base 10: mod_base = OTHER; note = guanosine
  modified_base 11: mod_base = OTHER; note = adenosine
  modified_base 12: mod_base = OTHER; note = guanosine
  modified_base 13: mod_base = um
  modified_base 14: mod_base = OTHER; note = adenosine
  modified_base 15: mod_base = cm
  modified_base 16: mod_base = OTHER; note = adenosine
  modified_base 17: mod_base = OTHER; note = guanosine
  modified_base 18: mod_base = um
  modified_base 19: mod_base = OTHER; note = guanosine
  modified_base 20: mod_base = OTHER; note = 2'-deoxythymidine
  modified_base 21: mod_base = OTHER; note = 2'-deoxythymidine
  source 1..21: mol_type = other RNA
ggtcaagaggagtacagtgtt

SEQ ID NO: 908 - RNA, 21 nt, synthetic construct
  modified_base 20..21: mod_base = OTHER; note = thymine
  modified_base 1: mod_base = OTHER; note = guanosine
  modified_base 2: mod_base = um
  modified_base 3: mod_base = cm
  modified_base 4: mod_base = OTHER; note = adenosine
  modified_base 5: mod_base = OTHER; note = adenosine
  modified_base 6: mod_base = OTHER; note = guanosine
  modified_base 7: mod_base = OTHER; note = adenosine
  modified_base 8: mod_base = OTHER; note = guanosine
  modified_base 9: mod_base = OTHER; note = guanosine
  modified_base 10: mod_base = OTHER; note = adenosine
  modified_base 11: mod_base = OTHER; note = guanosine
  modified_base 12: mod_base = um
  modified_base 13: mod_base = OTHER; note = adenosine
  modified_base 14: mod_base = cm
  modified_base 15: mod_base = OTHER; note = adenosine
  modified_base 16: mod_base = OTHER; note = guanosine
  modified_base 17: mod_base = um
  modified_base 18: mod_base = OTHER; note = guanosine
  modified_base 19: mod_base = cm
  modified_base 20: mod_base = OTHER; note = 2'-deoxythymidine
  modified_base 21: mod_base = OTHER; note = 2'-deoxythymidine
  source 1..21: mol_type = other RNA
gtcaagaggagtacagtgctt

SEQ ID NO: 909 - RNA, 21 nt, synthetic construct
  modified_base 20..21: mod_base = OTHER; note = thymine
  modified_base 1: mod_base = um
  modified_base 2: mod_base = cm
  modified_base 3: mod_base = OTHER; note = adenosine
  modified_base 4: mod_base = OTHER; note = adenosine
  modified_base 5: mod_base = OTHER; note = guanosine
  modified_base 6: mod_base = OTHER; note = adenosine
  modified_base 7: mod_base = OTHER; note = guanosine
  modified_base 8: mod_base = OTHER; note = guanosine
  modified_base 9: mod_base = OTHER; note = adenosine
  modified_base 10: mod_base = OTHER; note = guanosine
  modified_base 11: mod_base = um
  modified_base 12: mod_base = OTHER; note = adenosine
  modified_base 13: mod_base = cm
  modified_base 14: mod_base = OTHER; note = adenosine
  modified_base 15: mod_base = OTHER; note = guanosine
  modified_base 16: mod_base = um
  modified_base 17: mod_base = OTHER; note = guanosine
  modified_base 18: mod_base = cm
  modified_base 19: mod_base = OTHER; note = adenosine
  modified_base 20: mod_base = OTHER; note = 2'-deoxythymidine
  modified_base 21: mod_base = OTHER; note = 2'-deoxythymidine
  source 1..21: mol_type = other RNA
tcaagaggagtacagtgcatt

SEQ ID NO: 910 - RNA, 21 nt, synthetic construct
  modified_base 20..21: mod_base = OTHER; note = thymine
  modified_base 1: mod_base = cm
  modified_base 2: mod_base = OTHER; note = adenosine
  modified_base 3: mod_base = OTHER; note = adenosine
  modified_base 4: mod_base = OTHER; note = guanosine
  modified_base 5: mod_base = OTHER; note = adenosine
  modified_base 6: mod_base = OTHER; note = guanosine
  modified_base 7: mod_base = OTHER; note = guanosine
  modified_base 8: mod_base = OTHER; note = adenosine
  modified_base 9: mod_base = OTHER; note = guanosine
  modified_base 10: mod_base = um
  modified_base 11: mod_base = OTHER; note = adenosine
  modified_base 12: mod_base = cm
  modified_base 13: mod_base = OTHER; note = adenosine
  modified_base 14: mod_base = OTHER; note = guanosine
  modified_base 15: mod_base = um
  modified_base 16: mod_base = OTHER; note = guanosine
  modified_base 17: mod_base = cm
  modified_base 18: mod_base = OTHER; note = adenosine
  modified_base 19: mod_base = OTHER; note = adenosine
  modified_base 20: mod_base = OTHER; note = 2'-deoxythymidine
  modified_base 21: mod_base = OTHER; note = 2'-deoxythymidine
  source 1..21: mol_type = other RNA
caagaggagtacagtgcaatt

SEQ ID NO: 911 - RNA, 21 nt, synthetic construct
  modified_base 20..21: mod_base = OTHER; note = thymine
  modified_base 1: mod_base = OTHER; note = adenosine
  modified_base 2: mod_base = OTHER; note = adenosine
  modified_base 3: mod_base = OTHER; note = guanosine
  modified_base 4: mod_base = OTHER; note = adenosine
  modified_base 5: mod_base = OTHER; note = guanosine
  modified_base 6: mod_base = OTHER; note = guanosine
  modified_base 7: mod_base = OTHER; note = adenosine
  modified_base 8: mod_base = OTHER; note = guanosine
  modified_base 9: mod_base = um
  modified_base 10: mod_base = OTHER; note = adenosine
  modified_base 11: mod_base = cm
  modified_base 12: mod_base = OTHER; note = adenosine
  modified_base 13: mod_base = OTHER; note = guanosine
  modified_base 14: mod_base = um
  modified_base 15: mod_base = OTHER; note = guanosine
  modified_base 16: mod_base = cm
  modified_base 17: mod_base = OTHER; note = adenosine
  modified_base 18: mod_base = OTHER; note = adenosine
  modified_base 19: mod_base = um
  modified_base 20: mod_base = OTHER; note = 2'-deoxythymidine
  modified_base 21: mod_base = OTHER; note = 2'-deoxythymidine
  source 1..21: mol_type = other RNA
aagaggagtacagtgcaattt

SEQ ID NO: 912 - RNA, 21 nt, synthetic construct
  modified_base 20..21: mod_base = OTHER; note = thymine
  modified_base 1: mod_base = OTHER; note = adenosine
  modified_base 2: mod_base = OTHER; note = guanosine
  modified_base 3: mod_base = OTHER; note = adenosine
  modified_base 4: mod_base = OTHER; note = guanosine
  modified_base 5: mod_base = OTHER; note = guanosine
  modified_base 6: mod_base = OTHER; note = adenosine
  modified_base 7: mod_base = OTHER; note = guanosine
  modified_base 8: mod_base = um
  modified_base 9: mod_base = OTHER; note = adenosine
  modified_base 10: mod_base = cm
  modified_base 11: mod_base = OTHER; note = adenosine
  modified_base 12: mod_base = OTHER; note = guanosine
  modified_base 13: mod_base = um
  modified_base 14: mod_base = OTHER; note = guanosine
  modified_base 15: mod_base = cm
  modified_base 16: mod_base = OTHER; note = adenosine
  modified_base 17: mod_base = OTHER; note = adenosine
  modified_base 18: mod_base = um
  modified_base 19: mod_base = OTHER; note = guanosine
  modified_base 20: mod_base = OTHER; note = 2'-deoxythymidine
  modified_base 21: mod_base = OTHER; note = 2'-deoxythymidine
  source 1..21: mol_type = other RNA
agaggagtacagtgcaatgtt

SEQ ID NO: 913 - RNA, 21 nt, synthetic construct
  modified_base 20..21: mod_base = OTHER; note = thymine
  modified_base 1: mod_base = OTHER; note = guanosine
  modified_base 2: mod_base = OTHER; note = adenosine
  modified_base 3: mod_base = OTHER; note = guanosine
  modified_base 4: mod_base = OTHER; note = guanosine
  modified_base 5: mod_base = OTHER; note = adenosine
  modified_base 6: mod_base = OTHER; note = guanosine
  modified_base 7: mod_base = um
  modified_base 8: mod_base = OTHER; note = adenosine
  modified_base 9: mod_base = cm
  modified_base 10: mod_base = OTHER; note = adenosine
  modified_base 11: mod_base = OTHER; note = guanosine
  modified_base 12: mod_base = um
  modified_base 13: mod_base = OTHER; note = guanosine
  modified_base 14: mod_base = cm
  modified_base 15: mod_base = OTHER; note = adenosine
  modified_base 16: mod_base = OTHER; note = adenosine
  modified_base 17: mod_base = um
  modified_base 18: mod_base = OTHER; note = guanosine
  modified_base 19: mod_base = OTHER; note = adenosine
  modified_base 20: mod_base = OTHER; note = 2'-deoxythymidine
  modified_base 21: mod_base = OTHER; note = 2'-deoxythymidine
  source 1..21: mol_type = other RNA
gaggagtacagtgcaatgatt

SEQ ID NO: 914 - RNA, 21 nt, synthetic construct
  modified_base 20..21: mod_base = OTHER; note = thymine
  modified_base 1: mod_base = OTHER; note = adenosine
  modified_base 2: mod_base = OTHER; note = guanosine
  modified_base 3: mod_base = OTHER; note = guanosine
  modified_base 4: mod_base = OTHER; note = adenosine
  modified_base 5: mod_base = OTHER; note = guanosine
  modified_base 6: mod_base = um
  modified_base 7: mod_base = OTHER; note = adenosine
  modified_base 8: mod_base = cm
  modified_base 9: mod_base = OTHER; note = adenosine
  modified_base 10: mod_base = OTHER; note = guanosine
  modified_base 11: mod_base = um
  modified_base 12: mod_base = OTHER; note = guanosine
  modified_base 13: mod_base = cm
  modified_base 14: mod_base = OTHER; note = adenosine
  modified_base 15: mod_base = OTHER; note = adenosine
  modified_base 16: mod_base = um
  modified_base 17: mod_base = OTHER; note = guanosine
  modified_base 18: mod_base = OTHER; note = adenosine
  modified_base 19: mod_base = OTHER; note = guanosine
  modified_base 20: mod_base = OTHER; note = 2'-deoxythymidine
  modified_base 21: mod_base = OTHER; note = 2'-deoxythymidine
  source 1..21: mol_type = other RNA
aggagtacagtgcaatgagtt

SEQ ID NO: 915 - RNA, 21 nt, synthetic construct
  modified_base 20..21: mod_base = OTHER; note = thymine
  modified_base 1: mod_base = OTHER; note = guanosine
  modified_base 2: mod_base = OTHER; note = guanosine
  modified_base 3: mod_base = OTHER; note = adenosine
  modified_base 4: mod_base = OTHER; note = guanosine
  modified_base 5: mod_base = um
  modified_base 6: mod_base = OTHER; note = adenosine
  modified_base 7: mod_base = cm
  modified_base 8: mod_base = OTHER; note = adenosine
  modified_base 9: mod_base = OTHER; note = guanosine
  modified_base 10: mod_base = um
  modified_base 11: mod_base = OTHER; note = guanosine
  modified_base 12: mod_base = cm
  modified_base 13: mod_base = OTHER; note = adenosine
  modified_base 14: mod_base = OTHER; note = adenosine
  modified_base 15: mod_base = um
  modified_base 16: mod_base = OTHER; note = guanosine
  modified_base 17: mod_base = OTHER; note = adenosine
  modified_base 18: mod_base = OTHER; note = guanosine
  modified_base 19: mod_base = OTHER; note = guanosine
  modified_base 20: mod_base = OTHER; note = 2'-deoxythymidine
  modified_base 21: mod_base = OTHER; note = 2'-deoxythymidine
  source 1..21: mol_type = other RNA
ggagtacagtgcaatgaggtt

SEQ ID NO: 916 - RNA, 21 nt, synthetic construct
  modified_base 20..21: mod_base = OTHER; note = thymine
  modified_base 1: mod_base = OTHER; note = guanosine
  modified_base 2: mod_base = OTHER; note = adenosine
  modified_base 3: mod_base = OTHER; note = guanosine
  modified_base 4: mod_base = um
  modified_base 5: mod_base = OTHER; note = adenosine
  modified_base 6: mod_base = cm
  modified_base 7: mod_base = OTHER; note = adenosine
  modified_base 8: mod_base = OTHER; note = guanosine
  modified_base 9: mod_base = um
  modified_base 10: mod_base = OTHER; note = guanosine
  modified_base 11: mod_base = cm
  modified_base 12: mod_base = OTHER; note = adenosine
  modified_base 13: mod_base = OTHER; note = adenosine
  modified_base 14: mod_base = um
  modified_base 15: mod_base = OTHER; note = guanosine
  modified_base 16: mod_base = OTHER; note = adenosine
  modified_base 17: mod_base = OTHER; note = guanosine
  modified_base 18: mod_base = OTHER; note = guanosine
  modified_base 19: mod_base = OTHER; note = guanosine
  modified_base 20: mod_base = OTHER; note = 2'-deoxythymidine
  modified_base 21: mod_base = OTHER; note = 2'-deoxythymidine
  source 1..21: mol_type = other RNA
gagtacagtgcaatgagggtt

SEQ ID NO: 917 - RNA, 21 nt, synthetic construct
  modified_base 20..21: mod_base = OTHER; note = thymine
  modified_base 1: mod_base = OTHER; note = guanosine
  modified_base 2: mod_base = OTHER; note = guanosine
  modified_base 3: mod_base = OTHER; note = guanosine
  modified_base 4: mod_base = OTHER; note = guanosine
  modified_base 5: mod_base = OTHER; note = adenosine
  modified_base 6: mod_base = OTHER; note = guanosine
  modified_base 7: mod_base = OTHER; note = guanosine
  modified_base 8: mod_base = OTHER; note = guanosine
  modified_base 9: mod_base = cm
  modified_base 10: mod_base = um
  modified_base 11: mod_base = um
  modified_base 12: mod_base = um
  modified_base 13: mod_base = cm
  modified_base 14: mod_base = um
  modified_base 15: mod_base = um
  modified_base 16: mod_base = um
  modified_base 17: mod_base = OTHER; note = guanosine
  modified_base 18: mod_base = um
  modified_base 19: mod_base = OTHER; note = guanosine
  modified_base 20: mod_base = OTHER; note = 2'-deoxythymidine
  modified_base 21: mod_base = OTHER; note = 2'-deoxythymidine
  source 1..21: mol_type = other RNA
ggggagggctttctttgtgtt

SEQ ID NO: 918 - RNA, 21 nt, synthetic construct
  modified_base 20..21: mod_base = OTHER; note = thymine
  modified_base 1: mod_base = OTHER; note = guanosine
  modified_base 2: mod_base = OTHER; note = guanosine
  modified_base 3: mod_base = OTHER; note = guanosine
  modified_base 4: mod_base = OTHER; note = adenosine
  modified_base 5: mod_base = OTHER; note = guanosine
  modified_base 6: mod_base = OTHER; note = guanosine
  modified_base 7: mod_base = OTHER; note = guanosine
  modified_base 8: mod_base = cm
  modified_base 9: mod_base = um
  modified_base 10: mod_base = um
  modified_base 11: mod_base = um
  modified_base 12: mod_base = cm
  modified_base 13: mod_base = um
  modified_base 14: mod_base = um
  modified_base 15: mod_base = um
  modified_base 16: mod_base = OTHER; note = guanosine
  modified_base 17: mod_base = um
  modified_base 18: mod_base = OTHER; note = guanosine
  modified_base 19: mod_base = um
  modified_base 20: mod_base = OTHER; note = 2'-deoxythymidine
  modified_base 21: mod_base = OTHER; note = 2'-deoxythymidine
  source 1..21: mol_type = other RNA
gggagggctttctttgtgttt

SEQ ID NO: 919 - RNA, 21 nt, synthetic construct
  modified_base 20..21: mod_base = OTHER; note = thymine
  modified_base 1: mod_base = OTHER; note = guanosine
  modified_base 2: mod_base = OTHER; note = guanosine
  modified_base 3: mod_base = OTHER; note = adenosine
  modified_base 4: mod_base = OTHER; note = guanosine
  modified_base 5: mod_base = OTHER; note = guanosine
  modified_base 6: mod_base = OTHER; note = guanosine
  modified_base 7: mod_base = cm
  modified_base 8: mod_base = um
  modified_base 9: mod_base = um
  modified_base 10: mod_base = um
  modified_base 11: mod_base = cm
  modified_base 12: mod_base = um
  modified_base 13: mod_base = um
  modified_base 14: mod_base = um
  modified_base 15: mod_base = OTHER; note = guanosine
  modified_base 16: mod_base = um
  modified_base 17: mod_base = OTHER; note = guanosine
  modified_base 18: mod_base = um
  modified_base 19: mod_base = OTHER; note = adenosine
  modified_base 20: mod_base = OTHER; note = 2'-deoxythymidine
  modified_base 21: mod_base = OTHER; note = 2'-deoxythymidine
  source 1..21: mol_type = other RNA
ggagggctttctttgtgtatt

SEQ ID NO: 920 - RNA, 21 nt, synthetic construct
  modified_base 20..21: mod_base = OTHER; note = thymine
  modified_base 1: mod_base = OTHER; note = guanosine
  modified_base 2: mod_base = OTHER; note = adenosine
  modified_base 3: mod_base = OTHER; note = guanosine
  modified_base 4: mod_base = OTHER; note = guanosine
  modified_base 5: mod_base = OTHER; note = guanosine
  modified_base 6: mod_base = cm
  modified_base 7: mod_base = um
  modified_base 8: mod_base = um
  modified_base 9: mod_base = um
  modified_base 10: mod_base = cm
  modified_base 11: mod_base = um
  modified_base 12: mod_base = um
  modified_base 13: mod_base = um
  modified_base 14: mod_base = OTHER; note = guanosine
  modified_base 15: mod_base = um
  modified_base 16: mod_base = OTHER; note = guanosine
  modified_base 17: mod_base = um
  modified_base 18: mod_base = OTHER; note = adenosine
  modified_base 19: mod_base = um
  modified_base 20: mod_base = OTHER; note = 2'-deoxythymidine
  modified_base 21: mod_base = OTHER; note = 2'-deoxythymidine
  source 1..21: mol_type = other RNA
gagggctttctttgtgtattt

SEQ ID NO: 921 - RNA, 21 nt, synthetic construct
  modified_base 20..21: mod_base = OTHER; note = thymine
  modified_base 1: mod_base = OTHER; note = adenosine
  modified_base 2: mod_base = OTHER; note = guanosine
  modified_base 3: mod_base = OTHER; note = guanosine
  modified_base 4: mod_base = OTHER; note = guanosine
  modified_base 5: mod_base = cm
  modified_base 6: mod_base = um
  modified_base 7: mod_base = um
  modified_base 8: mod_base = um
  modified_base 9: mod_base = cm
  modified_base 10: mod_base = um
  modified_base 11: mod_base = um
  modified_base 12: mod_base = um
  modified_base 13: mod_base = OTHER; note = guanosine
  modified_base 14: mod_base = um
  modified_base 15: mod_base = OTHER; note = guanosine
  modified_base 16: mod_base = um
  modified_base 17: mod_base = OTHER; note = adenosine
  modified_base 18: mod_base = um
  modified_base 19: mod_base = um
  modified_base 20: mod_base = OTHER; note = 2'-deoxythymidine
  modified_base 21: mod_base = OTHER; note = 2'-deoxythymidine
  source 1..21: mol_type = other RNA
agggctttctttgtgtatttt

SEQ ID NO: 922 - RNA, 21 nt, synthetic construct
  modified_base 20..21: mod_base = OTHER; note = thymine
  modified_base 1: mod_base = OTHER; note = guanosine
  modified_base 2: mod_base = OTHER; note = guanosine
  modified_base 3: mod_base = OTHER; note = guanosine
  modified_base 4: mod_base = cm
  modified_base 5: mod_base = um
  modified_base 6: mod_base = um
  modified_base 7: mod_base = um
  modified_base 8: mod_base = cm
  modified_base 9: mod_base = um
  modified_base 10: mod_base = um
  modified_base 11: mod_base = um
  modified_base 12: mod_base = OTHER; note = guanosine
  modified_base 13: mod_base = um
  modified_base 14: mod_base = OTHER; note = guanosine
  modified_base 15: mod_base = um
  modified_base 16: mod_base = OTHER; note = adenosine
  modified_base 17: mod_base = um
  modified_base 18: mod_base = um
  modified_base 19: mod_base = um
  modified_base 20: mod_base = OTHER; note = 2'-deoxythymidine
  modified_base 21: mod_base = OTHER; note = 2'-deoxythymidine
  source 1..21: mol_type = other RNA
gggctttctttgtgtattttt

SEQ ID NO: 923 - RNA, 21 nt, synthetic construct
  modified_base 20..21: mod_base = OTHER; note = thymine
  modified_base 1: mod_base = OTHER; note = guanosine
  modified_base 2: mod_base = OTHER; note = guanosine
  modified_base 3: mod_base = cm
  modified_base 4: mod_base = um
  modified_base 5: mod_base = um
  modified_base 6: mod_base = um
  modified_base 7: mod_base = cm
  modified_base 8: mod_base = um
  modified_base 9: mod_base = um
  modified_base 10: mod_base = um
  modified_base 11: mod_base = OTHER; note = guanosine
  modified_base 12: mod_base = um
  modified_base 13: mod_base = OTHER; note = guanosine
  modified_base 14: mod_base = um
  modified_base 15: mod_base = OTHER; note = adenosine
  modified_base 16: mod_base = um
  modified_base 17: mod_base = um
  modified_base 18: mod_base = um
  modified_base 19: mod_base = OTHER; note = guanosine
  modified_base 20: mod_base = OTHER; note = 2'-deoxythymidine
  modified_base 21: mod_base = OTHER; note = 2'-deoxythymidine
  source 1..21: mol_type = other RNA
ggctttctttgtgtatttgtt

SEQ ID NO: 924 - RNA, 21 nt, synthetic construct
  modified_base 20..21: mod_base = OTHER; note = thymine
  modified_base 1: mod_base = OTHER; note = guanosine
  modified_base 2: mod_base = cm
  modified_base 3: mod_base = um
  modified_base 4: mod_base = um
  modified_base 5: mod_base = um
  modified_base 6: mod_base = cm
  modified_base 7: mod_base = um
  modified_base 8: mod_base = um
  modified_base 9: mod_base = um
  modified_base 10: mod_base = OTHER; note = guanosine
  modified_base 11: mod_base = um
  modified_base 12: mod_base = OTHER; note = guanosine
  modified_base 13: mod_base = um
  modified_base 14: mod_base = OTHER; note = adenosine
  modified_base 15: mod_base = um
  modified_base 16: mod_base = um
  modified_base 17: mod_base = um
  modified_base 18: mod_base = OTHER; note = guanosine
  modified_base 19: mod_base = cm
  modified_base 20: mod_base = OTHER; note = 2'-deoxythymidine
  modified_base 21: mod_base = OTHER; note = 2'-deoxythymidine
  source 1..21: mol_type = other RNA
gctttctttgtgtatttgctt

SEQ ID NO: 925 - RNA, 21 nt, synthetic construct
  modified_base 20..21: mod_base = OTHER; note = thymine
  modified_base 1: mod_base = cm
  modified_base 2: mod_base = um
  modified_base 3: mod_base = um
  modified_base 4: mod_base = um
  modified_base 5: mod_base = cm
  modified_base 6: mod_base = um
  modified_base 7: mod_base = um
  modified_base 8: mod_base = um
  modified_base 9: mod_base = OTHER; note = guanosine
  modified_base 10: mod_base = um
  modified_base 11: mod_base = OTHER; note = guanosine
  modified_base 12: mod_base = um
  modified_base 13: mod_base = OTHER; note = adenosine
  modified_base 14: mod_base = um
  modified_base 15: mod_base = um
  modified_base 16: mod_base = um
  modified_base 17: mod_base = OTHER; note = guanosine
  modified_base 18: mod_base = cm
  modified_base 19: mod_base = cm
  modified_base 20: mod_base = OTHER; note = 2'-deoxythymidine
  modified_base 21: mod_base = OTHER; note = 2'-deoxythymidine
  source 1..21: mol_type = other RNA
ctttctttgtgtatttgcctt

SEQ ID NO: 926 - RNA, 21 nt, synthetic construct
  modified_base 20..21: mod_base = OTHER; note = thymine
  modified_base 1: mod_base = um
  modified_base 2: mod_base = um
  modified_base 3: mod_base = um
  modified_base 4: mod_base = cm
  modified_base 5: mod_base = um
  modified_base 6: mod_base = um
  modified_base 7: mod_base = um
  modified_base 8: mod_base = OTHER; note = guanosine
  modified_base 9: mod_base = um
  modified_base 10: mod_base = OTHER; note = guanosine
  modified_base 11: mod_base = um
  modified_base 12: mod_base = OTHER; note = adenosine
  modified_base 13: mod_base = um
  modified_base 14: mod_base = um
  modified_base 15: mod_base = um
  modified_base 16: mod_base = OTHER; note = guanosine
  modified_base 17: mod_base = cm
  modified_base 18: mod_base = cm
  modified_base 19: mod_base = OTHER; note = adenosine
  modified_base 20: mod_base = OTHER; note = 2'-deoxythymidine
  modified_base 21: mod_base = OTHER; note = 2'-deoxythymidine
  source 1..21: mol_type = other RNA
tttctttgtgtatttgccatt

SEQ ID NO: 927 - RNA, 21 nt, synthetic construct
  modified_base 20..21: mod_base = OTHER; note = thymine
  modified_base 1: mod_base = um
  modified_base 2: mod_base = um
  modified_base 3: mod_base = cm
  modified_base 4: mod_base = um
  modified_base 5: mod_base = um
  modified_base 6: mod_base = um
  modified_base 7: mod_base = OTHER; note = guanosine
  modified_base 8: mod_base = um
  modified_base 9: mod_base = OTHER; note = guanosine
  modified_base 10: mod_base = um
  modified_base 11: mod_base = OTHER; note = adenosine
  modified_base 12: mod_base = um
  modified_base 13: mod_base = um
  modified_base 14: mod_base = um
  modified_base 15: mod_base = OTHER; note = guanosine
  modified_base 16: mod_base = cm
  modified_base 17: mod_base = cm
  modified_base 18: mod_base = OTHER; note = adenosine
  modified_base 19: mod_base = um
  modified_base 20: mod_base = OTHER; note = 2'-deoxythymidine
  modified_base 21: mod_base = OTHER; note = 2'-deoxythymidine
  source 1..21: mol_type = other RNA
ttctttgtgtatttgccattt

SEQ ID NO: 928 - RNA, 21 nt, synthetic construct
  modified_base 20..21: mod_base = OTHER; note = thymine
  modified_base 1: mod_base = um
  modified_base 2: mod_base = cm
  modified_base 3: mod_base = um
  modified_base 4: mod_base = um
  modified_base 5: mod_base = um
  modified_base 6: mod_base = OTHER; note = guanosine
  modified_base 7: mod_base = um
  modified_base 8: mod_base = OTHER; note = guanosine
  modified_base 9: mod_base = um
  modified_base 10: mod_base = OTHER; note = adenosine
  modified_base 11: mod_base = um
  modified_base 12: mod_base = um
  modified_base 13: mod_base = um
  modified_base 14: mod_base = OTHER; note = guanosine
  modified_base 15: mod_base = cm
  modified_base 16: mod_base = cm
  modified_base 17: mod_base = OTHER; note = adenosine
  modified_base 18: mod_base = um
  modified_base 19: mod_base = OTHER; note = adenosine
  modified_base 20: mod_base = OTHER; note = 2'-deoxythymidine
  modified_base 21: mod_base = OTHER; note = 2'-deoxythymidine
  source 1..21: mol_type = other RNA
tctttgtgtatttgccatatt

SEQ ID NO: 929 - RNA, 21 nt, synthetic construct
  modified_base 20..21: mod_base = OTHER; note = thymine
  modified_base 1: mod_base = cm
  modified_base 2: mod_base = um
  modified_base 3: mod_base = um
  modified_base 4: mod_base = um
  modified_base 5: mod_base = OTHER; note = guanosine
  modified_base 6: mod_base = um
  modified_base 7: mod_base = OTHER; note = guanosine
  modified_base 8: mod_base = um
  modified_base 9: mod_base = OTHER; note = adenosine
  modified_base 10: mod_base = um
  modified_base 11: mod_base = um
  modified_base 12: mod_base = um
  modified_base 13: mod_base = OTHER; note = guanosine
  modified_base 14: mod_base = cm
  modified_base 15: mod_base = cm
  modified_base 16: mod_base = OTHER; note = adenosine
  modified_base 17: mod_base = um
  modified_base 18: mod_base = OTHER; note = adenosine
  modified_base 19: mod_base = OTHER; note = adenosine
  modified_base 20: mod_base = OTHER; note = 2'-deoxythymidine
  modified_base 21: mod_base = OTHER; note = 2'-deoxythymidine
  source 1..21: mol_type = other RNA
ctttgtgtatttgccataatt

SEQ ID NO: 930 - RNA, 21 nt, synthetic construct
  modified_base 20..21: mod_base = OTHER; note = thymine
  modified_base 1: mod_base = um
  modified_base 2: mod_base = um
  modified_base 3: mod_base = um
  modified_base 4: mod_base = OTHER; note = guanosine
  modified_base 5: mod_base = um
  modified_base 6: mod_base = OTHER; note = guanosine
  modified_base 7: mod_base = um
  modified_base 8: mod_base = OTHER; note = adenosine
  modified_base 9: mod_base = um
  modified_base 10: mod_base = um
  modified_base 11: mod_base = um
  modified_base 12: mod_base = OTHER; note = guanosine
  modified_base 13: mod_base = cm
  modified_base 14: mod_base = cm
  modified_base 15: mod_base = OTHER; note = adenosine
  modified_base 16: mod_base = um
  modified_base 17: mod_base = OTHER; note = adenosine
  modified_base 18: mod_base = OTHER; note = adenosine
  modified_base 19: mod_base = OTHER; note = adenosine
  modified_base 20: mod_base = OTHER; note = 2'-deoxythymidine
  modified_base 21: mod_base = OTHER; note = 2'-deoxythymidine
  source 1..21: mol_type = other RNA
tttgtgtatttgccataaatt

SEQ ID NO: 931 - RNA, 21 nt, synthetic construct
  modified_base 20..21: mod_base = OTHER; note = thymine
  modified_base 1: mod_base = um
  modified_base 2: mod_base = um
  modified_base 3: mod_base = OTHER; note = guanosine
  modified_base 4: mod_base = um
  modified_base 5: mod_base = OTHER; note = guanosine
  modified_base 6: mod_base = um
  modified_base 7: mod_base = OTHER; note = adenosine
  modified_base 8: mod_base = um
  modified_base 9: mod_base = um
  modified_base 10: mod_base = um
  modified_base 11: mod_base = OTHER; note = guanosine
  modified_base 12: mod_base = cm
  modified_base 13: mod_base = cm
  modified_base 14: mod_base = OTHER; note = adenosine
  modified_base 15: mod_base = um
  modified_base 16: mod_base = OTHER; note = adenosine
  modified_base 17: mod_base = OTHER; note = adenosine
  modified_base 18: mod_base = OTHER; note = adenosine
  modified_base 19: mod_base = um
  modified_base 20: mod_base = OTHER; note = 2'-deoxythymidine
  modified_base 21: mod_base = OTHER; note = 2'-deoxythymidine
  source 1..21: mol_type = other RNA
ttgtgtatttgccataaattt

SEQ ID NO: 932 - RNA, 21 nt, synthetic construct
  modified_base 20..21: mod_base = OTHER; note = thymine
  modified_base 1: mod_base = um
  modified_base 2: mod_base = OTHER; note = guanosine
  modified_base 3: mod_base = um
  modified_base 4: mod_base = OTHER; note = guanosine
  modified_base 5: mod_base = um
  modified_base 6: mod_base = OTHER; note = adenosine
  modified_base 7: mod_base = um
  modified_base 8: mod_base = um
  modified_base 9: mod_base = um
  modified_base 10: mod_base = OTHER; note = guanosine
  modified_base 11: mod_base = cm
  modified_base 12: mod_base = cm
  modified_base 13: mod_base = OTHER; note = adenosine
  modified_base 14: mod_base = um
  modified_base 15: mod_base = OTHER; note = adenosine
  modified_base 16: mod_base = OTHER; note = adenosine
  modified_base 17: mod_base = OTHER; note = adenosine
  modified_base 18: mod_base = um
  modified_base 19: mod_base = OTHER; note = adenosine
  modified_base 20: mod_base = OTHER; note = 2'-deoxythymidine
  modified_base 21: mod_base = OTHER; note = 2'-deoxythymidine
  source 1..21: mol_type = other RNA
tgtgtatttgccataaatatt

SEQ ID NO: 933 - RNA, 21 nt, synthetic construct
  modified_base 20..21: mod_base = OTHER; note = thymine
  modified_base 1: mod_base = OTHER; note = guanosine
  modified_base 2: mod_base = um
  modified_base 3: mod_base = OTHER; note = guanosine
  modified_base 4: mod_base = um
  modified_base 5: mod_base = OTHER; note = adenosine
  modified_base 6: mod_base = um
  modified_base 7: mod_base = um
  modified_base 8: mod_base = um
  modified_base 9: mod_base = OTHER; note = guanosine
  modified_base 10: mod_base = cm
  modified_base 11: mod_base = cm
  modified_base 12: mod_base = OTHER; note = adenosine
  modified_base 13: mod_base = um
  modified_base 14: mod_base = OTHER; note = adenosine
  modified_base 15: mod_base = OTHER; note = adenosine
  modified_base 16: mod_base = OTHER; note = adenosine
  modified_base 17: mod_base = um
  modified_base 18: mod_base = OTHER; note = adenosine
  modified_base 19: mod_base = OTHER; note = adenosine
  modified_base 20: mod_base = OTHER; note = 2'-deoxythymidine
  modified_base 21: mod_base = OTHER; note = 2'-deoxythymidine
  source 1..21: mol_type = other RNA
gtgtatttgccataaataatt

SEQ ID NO: 934 - RNA, 21 nt, synthetic construct
  modified_base 20..21: mod_base = OTHER; note = thymine
  modified_base 1: mod_base = um
  modified_base 2: mod_base = OTHER; note = guanosine
  modified_base 3: mod_base = um
  modified_base 4: mod_base = OTHER; note = adenosine
  modified_base 5: mod_base = um
  modified_base 6: mod_base = um
  modified_base 7: mod_base = um
  modified_base 8: mod_base = OTHER; note = guanosine
  modified_base 9: mod_base = cm
  modified_base 10: mod_base = cm
  modified_base 11: mod_base = OTHER; note = adenosine
  modified_base 12: mod_base = um
  modified_base 13: mod_base = OTHER; note = adenosine
  modified_base 14: mod_base = OTHER; note = adenosine
  modified_base 15: mod_base = OTHER; note = adenosine
  modified_base 16: mod_base = um
  modified_base 17: mod_base = OTHER; note = adenosine
  modified_base 18: mod_base = OTHER; note = adenosine
  modified_base 19: mod_base = um
  modified_base 20: mod_base = OTHER; note = 2'-deoxythymidine
  modified_base 21: mod_base = OTHER; note = 2'-deoxythymidine
  source 1..21: mol_type = other RNA
tgtatttgccataaataattt

SEQ ID NO: 935 - RNA, 21 nt, synthetic construct
  modified_base 20..21: mod_base = OTHER; note = thymine
  modified_base 1: mod_base = OTHER; note = guanosine
  modified_base 2: mod_base = um
  modified_base 3: mod_base = OTHER; note = adenosine
  modified_base 4: mod_base = um
  modified_base 5: mod_base = um
  modified_base 6: mod_base = um
  modified_base 7: mod_base = OTHER; note = guanosine
  modified_base 8: mod_base = cm
  modified_base 9: mod_base = cm
  modified_base 10: mod_base = OTHER; note = adenosine
  modified_base 11: mod_base = um
  modified_base 12: mod_base = OTHER; note = adenosine
  modified_base 13: mod_base = OTHER; note = adenosine
  modified_base 14: mod_base = OTHER; note = adenosine
  modified_base 15: mod_base = um
  modified_base 16: mod_base = OTHER; note = adenosine
  modified_base 17: mod_base = OTHER; note = adenosine
  modified_base 18: mod_base = um
  modified_base 19: mod_base = OTHER; note = adenosine
  modified_base 20: mod_base = OTHER; note = 2'-deoxythymidine
  modified_base 21: mod_base = OTHER; note = 2'-deoxythymidine
  source 1..21: mol_type = other RNA
gtatttgccataaataatatt

SEQ ID NO: 936 - RNA, 21 nt, synthetic construct
  modified_base 20..21: mod_base = OTHER; note = thymine
  modified_base 1: mod_base = um
  modified_base 2: mod_base = OTHER; note = adenosine
  modified_base 3: mod_base = um
  modified_base 4: mod_base = um
  modified_base 5: mod_base = um
  modified_base 6: mod_base = OTHER; note = guanosine
  modified_base 7: mod_base = cm
  modified_base 8: mod_base = cm
  modified_base 9: mod_base = OTHER; note = adenosine
  modified_base 10: mod_base = um
  modified_base 11: mod_base = OTHER; note = adenosine
  modified_base 12: mod_base = OTHER; note = adenosine
  modified_base 13: mod_base = OTHER; note = adenosine
  modified_base 14: mod_base = um
  modified_base 15: mod_base = OTHER; note = adenosine
  modified_base 16: mod_base = OTHER; note = adenosine
  modified_base 17: mod_base = um
  modified_base 18: mod_base = OTHER; note = adenosine
  modified_base 19: mod_base = cm
  modified_base 20: mod_base = OTHER; note = 2'-deoxythymidine
  modified_base 21: mod_base = OTHER; note = 2'-deoxythymidine
  source 1..21: mol_type = other RNA
tatttgccataaataatactt

SEQ ID NO: 937 - RNA, 21 nt, synthetic construct
  modified_base 20..21: mod_base = OTHER; note = thymine
  modified_base 1: mod_base = OTHER; note = adenosine
  modified_base 2: mod_base = um
  modified_base 3: mod_base = um
  modified_base 4: mod_base = um
  modified_base 5: mod_base = OTHER; note = guanosine
  modified_base 6: mod_base = cm
  modified_base 7: mod_base = cm
  modified_base 8: mod_base = OTHER; note = adenosine
  modified_base 9: mod_base = um
  modified_base 10: mod_base = OTHER; note = adenosine
  modified_base 11: mod_base = OTHER; note = adenosine
  modified_base 12: mod_base = OTHER; note = adenosine
  modified_base 13: mod_base = um
  modified_base 14: mod_base = OTHER; note = adenosine
  modified_base 15: mod_base = OTHER; note = adenosine
  modified_base 16: mod_base = um
  modified_base 17: mod_base = OTHER; note = adenosine
  modified_base 18: mod_base = cm
  modified_base 19: mod_base = um
  modified_base 20: mod_base = OTHER; note = 2'-deoxythymidine
  modified_base 21: mod_base = OTHER; note = 2'-deoxythymidine
  source 1..21: mol_type = other RNA
atttgccataaataatacttt

SEQ ID NO: 938 - RNA, 21 nt, synthetic construct
  modified_base 20..21: mod_base = OTHER; note = thymine
  modified_base 1: mod_base = um
  modified_base 2: mod_base = um
  modified_base 3: mod_base = um
  modified_base 4: mod_base = OTHER; note = guanosine
  modified_base 5: mod_base = cm
  modified_base 6: mod_base = cm
  modified_base 7: mod_base = OTHER; note = adenosine
  modified_base 8: mod_base = um
  modified_base 9: mod_base = OTHER; note = adenosine
  modified_base 10: mod_base = OTHER; note = adenosine
  modified_base 11: mod_base = OTHER; note = adenosine
  modified_base 12: mod_base = um
  modified_base 13: mod_base = OTHER; note = adenosine
  modified_base 14: mod_base = OTHER; note = adenosine
  modified_base 15: mod_base = um
  modified_base 16: mod_base = OTHER; note = adenosine
  modified_base 17: mod_base = cm
  modified_base 18: mod_base = um
  modified_base 19: mod_base = OTHER; note = adenosine
  modified_base 20: mod_base = OTHER; note = 2'-deoxythymidine
  modified_base 21: mod_base = OTHER; note = 2'-deoxythymidine
  source 1..21: mol_type = other RNA
tttgccataaataatactatt

SEQ ID NO: 939 - RNA, 21 nt, synthetic construct
  modified_base 20..21: mod_base = OTHER; note = thymine
  modified_base 1: mod_base = um
  modified_base 2: mod_base = OTHER; note = guanosine
  modified_base 3: mod_base = OTHER; note = adenosine
  modified_base 4: mod_base = OTHER; note = adenosine
  modified_base 5: mod_base = OTHER; note = guanosine
  modified_base 6: mod_base = OTHER; note = adenosine
  modified_base 7: mod_base = um
  modified_base 8: mod_base = OTHER; note = adenosine
  modified_base 9: mod_base = um
  modified_base 10: mod_base = um
  modified_base 11: mod_base = cm
  modified_base 12: mod_base = OTHER; note = adenosine
  modified_base 13: mod_base = cm
  modified_base 14: mod_base = cm
  modified_base 15: mod_base = OTHER; note = adenosine
  modified_base 16: mod_base = um
  modified_base 17: mod_base = um
  modified_base 18: mod_base = OTHER; note = adenosine
  modified_base 19: mod_base = um
  modified_base 20: mod_base = OTHER; note = 2'-deoxythymidine
  modified_base 21: mod_base = OTHER; note = 2'-deoxythymidine
  source 1..21: mol_type = other RNA
tgaagatattcaccattattt

SEQ ID NO: 940 - RNA, 21 nt, synthetic construct
  modified_base 20..21: mod_base = OTHER; note = thymine
  modified_base 1: mod_base = OTHER; note = guanosine
  modified_base 2: mod_base = OTHER; note = adenosine
  modified_base 3: mod_base = OTHER; note = adenosine
  modified_base 4: mod_base = OTHER; note = guanosine
  modified_base 5: mod_base = OTHER; note = adenosine
  modified_base 6: mod_base = um
  modified_base 7: mod_base = OTHER; note = adenosine
  modified_base 8: mod_base = um
  modified_base 9: mod_base = um
  modified_base 10: mod_base = cm
  modified_base 11: mod_base = OTHER; note = adenosine
  modified_base 12: mod_base = cm
  modified_base 13: mod_base = cm
  modified_base 14: mod_base = OTHER; note = adenosine
  modified_base 15: mod_base = um
  modified_base 16: mod_base = um
  modified_base 17: mod_base = OTHER; note = adenosine
  modified_base 18: mod_base = um
  modified_base 19: mod_base = OTHER; note = adenosine
  modified_base 20: mod_base = OTHER; note = 2'-deoxythymidine
  modified_base 21: mod_base = OTHER; note = 2'-deoxythymidine
  source 1..21: mol_type = other RNA
gaagatattcaccattatatt

SEQ ID NO: 941 - RNA, 21 nt, synthetic construct
  modified_base 20..21: mod_base = OTHER; note = thymine
  modified_base 1: mod_base = OTHER; note = adenosine
  modified_base 2: mod_base = OTHER; note = guanosine
  modified_base 3: mod_base = OTHER; note = adenosine
  modified_base 4: mod_base = um
  modified_base 5: mod_base = OTHER; note = adenosine
  modified_base 6: mod_base = um
  modified_base 7: mod_base = um
  modified_base 8: mod_base = cm
  modified_base 9: mod_base = OTHER; note = adenosine
  modified_base 10: mod_base = cm
  modified_base 11: mod_base = cm
  modified_base 12: mod_base = OTHER; note = adenosine
  modified_base 13: mod_base = um
  modified_base 14: mod_base = um
  modified_base 15: mod_base = OTHER; note = adenosine
  modified_base 16: mod_base = um
  modified_base 17: mod_base = OTHER; note = adenosine
  modified_base 18: mod_base = OTHER; note = guanosine
  modified_base 19: mod_base = OTHER; note = adenosine
  modified_base 20: mod_base = OTHER; note = 2'-deoxythymidine
  modified_base 21: mod_base = OTHER; note = 2'-deoxythymidine
  source 1..21: mol_type = other RNA
agatattcaccattatagatt

SEQ ID NO: 942 - RNA, 21 nt, synthetic construct
  modified_base 20..21: mod_base = OTHER; note = thymine
  modified_base 1: mod_base = OTHER; note = adenosine
  modified_base 2: mod_base = OTHER; note = adenosine
  modified_base 3: mod_base = OTHER; note = adenosine
  modified_base 4: mod_base = cm
  modified_base 5: mod_base = OTHER; note = adenosine
  modified_base 6: mod_base = um
  modified_base 7: mod_base = cm
  modified_base 8: mod_base = OTHER; note = adenosine
  modified_base 9: mod_base = OTHER; note = guanosine
  modified_base 10: mod_base = cm
  modified_base 11: mod_base = OTHER; note = adenosine
  modified_base 12: mod_base = OTHER; note = adenosine
  modified_base 13: mod_base = OTHER; note = adenosine
  modified_base 14: mod_base = OTHER; note = guanosine
  modified_base 15: mod_base = OTHER; note = adenosine
  modified_base 16: mod_base = cm
  modified_base 17: mod_base = OTHER; note = adenosine
  modified_base 18: mod_base = OTHER; note = adenosine
  modified_base 19: mod_base = OTHER; note = guanosine
  modified_base 20: mod_base = OTHER; note = 2'-deoxythymidine
  modified_base 21: mod_base = OTHER; note = 2'-deoxythymidine
  source 1..21: mol_type = other RNA
aaacatcagcaaagacaagtt

SEQ ID NO: 943 - RNA, 21 nt, synthetic construct
  modified_base 20..21: mod_base = OTHER; note = thymine
  modified_base 1: mod_base = OTHER; note = adenosine
  modified_base 2: mod_base = OTHER; note = adenosine
  modified_base 3: mod_base = cm
  modified_base 4: mod_base = OTHER; note = adenosine
  modified_base 5: mod_base = um
  modified_base 6: mod_base = cm
  modified_base 7: mod_base = OTHER; note = adenosine
  modified_base 8: mod_base = OTHER; note = guanosine
  modified_base 9: mod_base = cm
  modified_base 10: mod_base = OTHER; note = adenosine
  modified_base 11: mod_base = OTHER; note = adenosine
  modified_base 12: mod_base = OTHER; note = adenosine
  modified_base 13: mod_base = OTHER; note = guanosine
  modified_base 14: mod_base = OTHER; note = adenosine
  modified_base 15: mod_base = cm
  modified_base 16: mod_base = OTHER; note = adenosine
  modified_base 17: mod_base = OTHER; note = adenosine
  modified_base 18: mod_base = OTHER; note = guanosine
  modified_base 19: mod_base = OTHER; note = adenosine
  modified_base 20: mod_base = OTHER; note = 2'-deoxythymidine
  modified_base 21: mod_base = OTHER; note = 2'-deoxythymidine
  source 1..21: mol_type = other RNA
aacatcagcaaagacaagatt

SEQ ID NO: 944 - RNA, 21 nt, synthetic construct
  modified_base 20..21: mod_base = OTHER; note = thymine
  modified_base 1: mod_base = OTHER; note = adenosine
  modified_base 2: mod_base = cm
  modified_base 3: mod_base = OTHER; note = adenosine
  modified_base 4: mod_base = um
  modified_base 5: mod_base = cm
  modified_base 6: mod_base = OTHER; note = adenosine
  modified_base 7: mod_base = OTHER; note = guanosine
  modified_base 8: mod_base = cm
  modified_base 9: mod_base = OTHER; note = adenosine
  modified_base 10: mod_base = OTHER; note = adenosine
  modified_base 11: mod_base = OTHER; note = adenosine
  modified_base 12: mod_base = OTHER; note = guanosine
  modified_base 13: mod_base = OTHER; note = adenosine
  modified_base 14: mod_base = cm
  modified_base 15: mod_base = OTHER; note = adenosine
  modified_base 16: mod_base = OTHER; note = adenosine
  modified_base 17: mod_base = OTHER; note = guanosine
  modified_base 18: mod_base = OTHER; note = adenosine
  modified_base 19: mod_base = cm
  modified_base 20: mod_base = OTHER; note = 2'-deoxythymidine
  modified_base 21: mod_base = OTHER; note = 2'-deoxythymidine
  source 1..21: mol_type = other RNA
acatcagcaaagacaagactt

SEQ ID NO: 945 - RNA, 21 nt, synthetic construct
  modified_base 20..21: mod_base = OTHER; note = thymine
  modified_base 1: mod_base = cm
  modified_base 2: mod_base = OTHER; note = adenosine
  modified_base 3: mod_base = um
  modified_base 4: mod_base = cm
  modified_base 5: mod_base = OTHER; note = adenosine
  modified_base 6: mod_base = OTHER; note = guanosine
  modified_base 7: mod_base = cm
  modified_base 8: mod_base = OTHER; note = adenosine
  modified_base 9: mod_base = OTHER; note = adenosine
  modified_base 10: mod_base = OTHER; note = adenosine
  modified_base 11: mod_base = OTHER; note = guanosine
  modified_base 12: mod_base = OTHER; note = adenosine
  modified_base 13: mod_base = cm
  modified_base 14: mod_base = OTHER; note = adenosine
  modified_base 15: mod_base = OTHER; note = adenosine
  modified_base 16: mod_base = OTHER; note = guanosine
  modified_base 17: mod_base = OTHER; note = adenosine
  modified_base 18: mod_base = cm
  modified_base 19: mod_base = OTHER; note = adenosine
  modified_base 20: mod_base = OTHER; note = 2'-deoxythymidine
  modified_base 21: mod_base = OTHER; note = 2'-deoxythymidine
  source 1..21: mol_type = other RNA
catcagcaaagacaagacatt

SEQ ID NO: 946 - RNA, 21 nt, synthetic construct
  modified_base 20..21: mod_base = OTHER; note = thymine
  modified_base 1: mod_base = OTHER; note = adenosine
  modified_base 2: mod_base = um
  modified_base 3: mod_base = cm
  modified_base 4: mod_base = OTHER; note = adenosine
  modified_base 5: mod_base = OTHER; note = guanosine
  modified_base 6: mod_base = cm
  modified_base 7: mod_base = OTHER; note = adenosine
  modified_base 8: mod_base = OTHER; note = adenosine
  modified_base 9: mod_base = OTHER; note = adenosine
  modified_base 10: mod_base = OTHER; note = guanosine
  modified_base 11: mod_base = OTHER; note = adenosine
  modified_base 12: mod_base = cm
  modified_base 13: mod_base = OTHER; note = adenosine
  modified_base 14: mod_base = OTHER; note = adenosine
  modified_base 15: mod_base = OTHER; note = guanosine
  modified_base 16: mod_base = OTHER; note = adenosine
  modified_base 17: mod_base = cm
  modified_base 18: mod_base = OTHER; note = adenosine
  modified_base 19: mod_base = OTHER; note = guanosine
  modified_base 20: mod_base = OTHER; note = 2'-deoxythymidine
  modified_base 21: mod_base = OTHER; note = 2'-deoxythymidine
  source 1..21: mol_type = other RNA
atcagcaaagacaagacagtt

SEQ ID NO: 947 - RNA, 21 nt, synthetic construct
  modified_base 20..21: mod_base = OTHER; note = thymine
  modified_base 1: mod_base = OTHER; note = guanosine
  modified_base 2: mod_base = OTHER; note = adenosine
  modified_base 3: mod_base = um
  modified_base 4: mod_base = OTHER; note = adenosine
  modified_base 5: mod_base = um
  modified_base 6: mod_base = um
  modified_base 7: mod_base = cm
  modified_base 8: mod_base = um
  modified_base 9: mod_base = cm
  modified_base 10: mod_base = OTHER; note = guanosine
  modified_base 11: mod_base = OTHER; note = adenosine
  modified_base 12: mod_base = cm
  modified_base 13: mod_base = OTHER; note = adenosine
  modified_base 14: mod_base = cm
  modified_base 15: mod_base = OTHER; note = adenosine
  modified_base 16: mod_base = OTHER; note = guanosine
  modified_base 17: mod_base = cm
  modified_base 18: mod_base = OTHER; note = adenosine
  modified_base 19: mod_base = OTHER; note = guanosine
  modified_base 20: mod_base = OTHER; note = 2'-deoxythymidine
  modified_base 21: mod_base = OTHER; note = 2'-deoxythymidine
  source 1..21: mol_type = other RNA
gatattctcgacacagcagtt

SEQ ID NO: 948 - RNA, 21 nt, synthetic construct
  modified_base 20..21: mod_base = OTHER; note = thymine
  modified_base 1: mod_base = um
  modified_base 2: mod_base = um
  modified_base 3: mod_base = cm
  modified_base 4: mod_base = OTHER; note = adenosine
  modified_base 5: mod_base = cm
  modified_base 6: mod_base = cm
  modified_base 7: mod_base = OTHER; note = adenosine
  modified_base 8: mod_base = um
  modified_base 9: mod_base = um
  modified_base 10: mod_base = OTHER; note = adenosine
  modified_base 11: mod_base = um
  modified_base 12: mod_base = OTHER; note = adenosine
  modified_base 13: mod_base = OTHER; note = guanosine
  modified_base 14: mod_base = OTHER; note = adenosine
  modified_base 15: mod_base = OTHER; note = guanosine
  modified_base 16: mod_base = OTHER; note = adenosine
  modified_base 17: mod_base = OTHER; note = adenosine
  modified_base 18: mod_base = cm
  modified_base 19: mod_base = OTHER; note = adenosine
  modified_base 20: mod_base = OTHER; note = 2'-deoxythymidine
  modified_base 21: mod_base = OTHER; note = 2'-deoxythymidine
  source 1..21: mol_type = other RNA
ttcaccattatagagaacatt

SEQ ID NO: 949 - RNA, 21 nt, synthetic construct
  modified_base 20..21: mod_base = OTHER; note = thymine
  modified_base 1: mod_base = um
  modified_base 2: mod_base = OTHER; note = adenosine
  modified_base 3: mod_base = um
  modified_base 4: mod_base = um
  modified_base 5: mod_base = cm
  modified_base 6: mod_base = um
  modified_base 7: mod_base = cm
  modified_base 8: mod_base = OTHER; note = guanosine
  modified_base 9: mod_base = OTHER; note = adenosine
  modified_base 10: mod_base = cm
  modified_base 11: mod_base = OTHER; note = adenosine
  modified_base 12: mod_base = cm
  modified_base 13: mod_base = OTHER; note = adenosine
  modified_base 14: mod_base = OTHER; note = guanosine
  modified_base 15: mod_base = cm
  modified_base 16: mod_base = OTHER; note = adenosine
  modified_base 17: mod_base = OTHER; note = guanosine
  modified_base 18: mod_base = OTHER; note = guanosine
  modified_base 19: mod_base = um
  modified_base 20: mod_base = OTHER; note = 2'-deoxythymidine
  modified_base 21: mod_base = OTHER; note = 2'-deoxythymidine
  source 1..21: mol_type = other RNA
tattctcgacacagcaggttt

SEQ ID NO: 950 - RNA, 21 nt, synthetic construct
  modified_base 20..21: mod_base = OTHER; note = thymine
  modified_base 1: mod_base = um
  modified_base 2: mod_base = um
  modified_base 3: mod_base = cm
  modified_base 4: mod_base = um
  modified_base 5: mod_base = cm
  modified_base 6: mod_base = OTHER; note = guanosine
  modified_base 7: mod_base = OTHER; note = adenosine
  modified_base 8: mod_base = cm
  modified_base 9: mod_base = OTHER; note = adenosine
  modified_base 10: mod_base = cm
  modified_base 11: mod_base = OTHER; note = adenosine
  modified_base 12: mod_base = OTHER; note = guanosine
  modified_base 13: mod_base = cm
  modified_base 14: mod_base = OTHER; note = adenosine
  modified_base 15: mod_base = OTHER; note = guanosine
  modified_base 16: mod_base = OTHER; note = guanosine
  modified_base 17: mod_base = um
  modified_base 18: mod_base = cm
  modified_base 19: mod_base = OTHER; note = adenosine
  modified_base 20: mod_base = OTHER; note = 2'-deoxythymidine
  modified_base 21: mod_base = OTHER; note = 2'-deoxythymidine
  source 1..21: mol_type = other RNA
ttctcgacacagcaggtcatt

SEQ ID NO: 951 - RNA, 21 nt, synthetic construct
  modified_base 20..21: mod_base = OTHER; note = thymine
  modified_base 1: mod_base = OTHER; note = adenosine
  modified_base 2: mod_base = OTHER; note = adenosine
  modified_base 3: mod_base = OTHER; note = guanosine
  modified_base 4: mod_base = OTHER; note = adenosine
  modified_base 5: mod_base = um
  modified_base 6: mod_base = OTHER; note = adenosine
  modified_base 7: mod_base = um
  modified_base 8: mod_base = um
  modified_base 9: mod_base = cm
  modified_base 10: mod_base = OTHER; note = adenosine
  modified_base 11: mod_base = cm
  modified_base 12: mod_base = cm
  modified_base 13: mod_base = OTHER; note = adenosine
  modified_base 14: mod_base = um
  modified_base 15: mod_base = um
  modified_base 16: mod_base = OTHER; note = adenosine
  modified_base 17: mod_base = um
  modified_base 18: mod_base = OTHER; note = adenosine
  modified_base 19: mod_base = OTHER; note = guanosine
  modified_base 20: mod_base = OTHER; note = 2'-deoxythymidine
  modified_base 21: mod_base = OTHER; note = 2'-deoxythymidine
  source 1..21: mol_type = other RNA
aagatattcaccattatagtt

SEQ ID NO: 952 - RNA, 21 nt, synthetic construct
  modified_base 20..21: mod_base = OTHER; note = thymine
  modified_base 1: mod_base = OTHER; note = guanosine
  modified_base 2: mod_base = OTHER; note = adenosine
  modified_base 3: mod_base = um
  modified_base 4: mod_base = OTHER; note = adenosine
  modified_base 5: mod_base = um
  modified_base 6: mod_base = um
  modified_base 7: mod_base = cm
  modified_base 8: mod_base = OTHER; note = adenosine
  modified_base 9: mod_base = cm
  modified_base 10: mod_base = cm
  modified_base 11: mod_base = OTHER; note = adenosine
  modified_base 12: mod_base = um
  modified_base 13: mod_base = um
  modified_base 14: mod_base = OTHER; note = adenosine
  modified_base 15: mod_base = um
  modified_base 16: mod_base = OTHER; note = adenosine
  modified_base 17: mod_base = OTHER; note = guanosine
  modified_base 18: mod_base = OTHER; note = adenosine
  modified_base 19: mod_base = OTHER; note = guanosine
  modified_base 20: mod_base = OTHER; note = 2'-deoxythymidine
  modified_base 21: mod_base = OTHER; note = 2'-deoxythymidine
  source 1..21: mol_type = other RNA
gatattcaccattatagagtt

SEQ ID NO: 953 - RNA, 21 nt, synthetic construct
  modified_base 20..21: mod_base = OTHER; note = thymine
  modified_base 1: mod_base = OTHER; note = adenosine
  modified_base 2: mod_base = um
  modified_base 3: mod_base = OTHER; note = adenosine
  modified_base 4: mod_base = um
  modified_base 5: mod_base = um
  modified_base 6: mod_base = cm
  modified_base 7: mod_base = OTHER; note = adenosine
  modified_base 8: mod_base = cm
  modified_base 9: mod_base = cm
  modified_base 10: mod_base = OTHER; note = adenosine
  modified_base 11: mod_base = um
  modified_base 12: mod_base = um
  modified_base 13: mod_base = OTHER; note = adenosine
  modified_base 14: mod_base = um
  modified_base 15: mod_base = OTHER; note = adenosine
  modified_base 16: mod_base = OTHER; note = guanosine
  modified_base 17: mod_base = OTHER; note = adenosine
  modified_base 18: mod_base = OTHER; note = guanosine
  modified_base 19: mod_base = OTHER; note = adenosine
  modified_base 20: mod_base = OTHER; note = 2'-deoxythymidine
  modified_base 21: mod_base = OTHER; note = 2'-deoxythymidine
  source 1..21: mol_type = other RNA
atattcaccattatagagatt

SEQ ID NO: 954 - RNA, 21 nt, synthetic construct
  modified_base 1: mod_base = um
  modified_base 2: mod_base = OTHER; note = adenosine
  modified_base 3: mod_base = um
  modified_base 4: mod_base = um
  modified_base 5: mod_base = cm
  modified_base 6: mod_base = OTHER; note = adenosine
  modified_base 7: mod_base = cm
  modified_base 8: mod_base = cm
  modified_base 9: mod_base = OTHER; note = adenosine
  modified_base 10: mod_base = um
  modified_base 11: mod_base = um
  modified_base 12: mod_base = OTHER; note = adenosine
  modified_base 13: mod_base = um
  modified_base 14: mod_base = OTHER; note = adenosine
  modified_base 15: mod_base = OTHER; note = guanosine
  modified_base 16: mod_base = OTHER; note = adenosine
  modified_base 17: mod_base = OTHER; note = guanosine
  modified_base 18: mod_base = OTHER; note = adenosine
  modified_base 19: mod_base = OTHER; note = adenosine
  modified_base 20: mod_base = OTHER; note = 2'-deoxythymidine
  modified_base 21: mod_base = OTHER; note = 2'-deoxythymidine
  source 1..21: mol_type = other RNA
  modified_base 20..21: mod_base = OTHER; note = thymine
tattcaccattatagagaatt

SEQ ID NO: 955 - RNA, 21 nt, synthetic construct
  modified_base 20..21: mod_base = OTHER; note = thymine
  modified_base 1: mod_base = OTHER; note = adenosine
  modified_base 2: mod_base = um
  modified_base 3: mod_base = um
  modified_base 4: mod_base = cm
  modified_base 5: mod_base = OTHER; note = adenosine
  modified_base 6: mod_base = cm
  modified_base 7: mod_base = cm
  modified_base 8: mod_base = OTHER; note = adenosine
  modified_base 9: mod_base = um
  modified_base 10: mod_base = um
  modified_base 11: mod_base = OTHER; note = adenosine
  modified_base 12: mod_base = um
  modified_base 13: mod_base = OTHER; note = adenosine
  modified_base 14: mod_base = OTHER; note = guanosine
  modified_base 15: mod_base = OTHER; note = adenosine
  modified_base 16: mod_base = OTHER; note = guanosine
  modified_base 17: mod_base = OTHER; note = adenosine
  modified_base 18: mod_base = OTHER; note = adenosine
  modified_base 19: mod_base = cm
  modified_base 20: mod_base = OTHER; note = 2'-deoxythymidine
  modified_base 21: mod_base = OTHER; note = 2'-deoxythymidine
  source 1..21: mol_type = other RNA
attcaccattatagagaactt

SEQ ID NO: 956 - RNA, 21 nt, synthetic construct
  modified_base 20..21: mod_base = OTHER; note = thymine
  modified_base 1: mod_base = um
  modified_base 2: mod_base = cm
  modified_base 3: mod_base = OTHER; note = adenosine
  modified_base 4: mod_base = cm
  modified_base 5: mod_base = cm
  modified_base 6: mod_base = OTHER; note = adenosine
  modified_base 7: mod_base = um
  modified_base 8: mod_base = um
  modified_base 9: mod_base = OTHER; note = adenosine
  modified_base 10: mod_base = um
  modified_base 11: mod_base = OTHER; note = adenosine
  modified_base 12: mod_base = OTHER; note = guanosine
  modified_base 13: mod_base = OTHER; note = adenosine
  modified_base 14: mod_base = OTHER; note = guanosine
  modified_base 15: mod_base = OTHER; note = adenosine
  modified_base 16: mod_base = OTHER; note = adenosine
  modified_base 17: mod_base = cm
  modified_base 18: mod_base = OTHER; note = adenosine
  modified_base 19: mod_base = OTHER; note = adenosine
  modified_base 20: mod_base = OTHER; note = 2'-deoxythymidine
  modified_base 21: mod_base = OTHER; note = 2'-deoxythymidine
  source 1..21: mol_type = other RNA
tcaccattatagagaacaatt

SEQ ID NO: 957 - RNA, 21 nt, synthetic construct
  modified_base 20..21: mod_base = OTHER; note = thymine
  modified_base 1: mod_base = cm
  modified_base 2: mod_base = OTHER; note = adenosine
  modified_base 3: mod_base = cm
  modified_base 4: mod_base = cm
  modified_base 5: mod_base = OTHER; note = adenosine
  modified_base 6: mod_base = um
  modified_base 7: mod_base = um
  modified_base 8: mod_base = OTHER; note = adenosine
  modified_base 9: mod_base = um
  modified_base 10: mod_base = OTHER; note = adenosine
  modified_base 11: mod_base = OTHER; note = guanosine
  modified_base 12: mod_base = OTHER; note = adenosine
  modified_base 13: mod_base = OTHER; note = guanosine
  modified_base 14: mod_base = OTHER; note = adenosine
  modified_base 15: mod_base = OTHER; note = adenosine
  modified_base 16: mod_base = cm
  modified_base 17: mod_base = OTHER; note = adenosine
  modified_base 18: mod_base = OTHER; note = adenosine
  modified_base 19: mod_base = OTHER; note = adenosine
  modified_base 20: mod_base = OTHER; note = 2'-deoxythymidine
  modified_base 21: mod_base = OTHER; note = 2'-deoxythymidine
  source 1..21: mol_type = other RNA
caccattatagagaacaaatt

SEQ ID NO: 958 - RNA, 21 nt, synthetic construct
  modified_base 20..21: mod_base = OTHER; note = thymine
  modified_base 1: mod_base = OTHER; note = adenosine
  modified_base 2: mod_base = cm
  modified_base 3: mod_base = cm
  modified_base 4: mod_base = OTHER; note = adenosine
  modified_base 5: mod_base = um
  modified_base 6: mod_base = um
  modified_base 7: mod_base = OTHER; note = adenosine
  modified_base 8: mod_base = um
  modified_base 9: mod_base = OTHER; note = adenosine
  modified_base 10: mod_base = OTHER; note = guanosine
  modified_base 11: mod_base = OTHER; note = adenosine
  modified_base 12: mod_base = OTHER; note = guanosine
  modified_base 13: mod_base = OTHER; note = adenosine
  modified_base 14: mod_base = OTHER; note = adenosine
  modified_base 15: mod_base = cm
  modified_base 16: mod_base = OTHER; note = adenosine
  modified_base 17: mod_base = OTHER; note = adenosine
  modified_base 18: mod_base = OTHER; note = adenosine
  modified_base 19: mod_base = um
  modified_base 20: mod_base = OTHER; note = 2'-deoxythymidine
  modified_base 21: mod_base = OTHER; note = 2'-deoxythymidine
  source 1..21: mol_type = other RNA
accattatagagaacaaattt

SEQ ID NO: 959 - RNA, 21 nt, synthetic construct
  modified_base 20..21: mod_base = OTHER; note = thymine
  modified_base 1: mod_base = cm
  modified_base 2: mod_base = cm
  modified_base 3: mod_base = OTHER; note = adenosine
  modified_base 4: mod_base = um
  modified_base 5: mod_base = um
  modified_base 6: mod_base = OTHER; note = adenosine
  modified_base 7: mod_base = um
  modified_base 8: mod_base = OTHER; note = adenosine
  modified_base 9: mod_base = OTHER; note = guanosine
  modified_base 10: mod_base = OTHER; note = adenosine
  modified_base 11: mod_base = OTHER; note = guanosine
  modified_base 12: mod_base = OTHER; note = adenosine
  modified_base 13: mod_base = OTHER; note = adenosine
  modified_base 14: mod_base = cm
  modified_base 15: mod_base = OTHER; note = adenosine
  modified_base 16: mod_base = OTHER; note = adenosine
  modified_base 17: mod_base = OTHER; note = adenosine
  modified_base 18: mod_base = um
  modified_base 19: mod_base = um
  modified_base 20: mod_base = OTHER; note = 2'-deoxythymidine
  modified_base 21: mod_base = OTHER; note = 2'-deoxythymidine
  source 1..21: mol_type = other RNA
ccattatagagaacaaatttt

SEQ ID NO: 960 - RNA, 21 nt, synthetic construct
  modified_base 20..21: mod_base = OTHER; note = thymine
  modified_base 1: mod_base = cm
  modified_base 2: mod_base = OTHER; note = adenosine
  modified_base 3: mod_base = um
  modified_base 4: mod_base = um
  modified_base 5: mod_base = OTHER; note = adenosine
  modified_base 6: mod_base = um
  modified_base 7: mod_base = OTHER; note = adenosine
  modified_base 8: mod_base = OTHER; note = guanosine
  modified_base 9: mod_base = OTHER; note = adenosine
  modified_base 10: mod_base = OTHER; note = guanosine
  modified_base 11: mod_base = OTHER; note = adenosine
  modified_base 12: mod_base = OTHER; note = adenosine
  modified_base 13: mod_base = cm
  modified_base 14: mod_base = OTHER; note = adenosine
  modified_base 15: mod_base = OTHER; note = adenosine
  modified_base 16: mod_base = OTHER; note = adenosine
  modified_base 17: mod_base = um
  modified_base 18: mod_base = um
  modified_base 19: mod_base = OTHER; note = adenosine
  modified_base 20: mod_base = OTHER; note = 2'-deoxythymidine
  modified_base 21: mod_base = OTHER; note = 2'-deoxythymidine
  source 1..21: mol_type = other RNA
cattatagagaacaaattatt

SEQ ID NO: 961 - RNA, 21 nt, synthetic construct
  modified_base 20..21: mod_base = OTHER; note = thymine
  modified_base 1: mod_base = OTHER; note = adenosine
  modified_base 2: mod_base = um
  modified_base 3: mod_base = um
  modified_base 4: mod_base = OTHER; note = adenosine
  modified_base 5: mod_base = um
  modified_base 6: mod_base = OTHER; note = adenosine
  modified_base 7: mod_base = OTHER; note = guanosine
  modified_base 8: mod_base = OTHER; note = adenosine
  modified_base 9: mod_base = OTHER; note = guanosine
  modified_base 10: mod_base = OTHER; note = adenosine
  modified_base 11: mod_base = OTHER; note = adenosine
  modified_base 12: mod_base = cm
  modified_base 13: mod_base = OTHER; note = adenosine
  modified_base 14: mod_base = OTHER; note = adenosine
  modified_base 15: mod_base = OTHER; note = adenosine
  modified_base 16: mod_base = um
  modified_base 17: mod_base = um
  modified_base 18: mod_base = OTHER; note = adenosine
  modified_base 19: mod_base = OTHER; note = adenosine
  modified_base 20: mod_base = OTHER; note = 2'-deoxythymidine
  modified_base 21: mod_base = OTHER; note = 2'-deoxythymidine
  source 1..21: mol_type = other RNA
attatagagaacaaattaatt

SEQ ID NO: 962 - RNA, 21 nt, synthetic construct
  modified_base 20..21: mod_base = OTHER; note = thymine
  modified_base 1: mod_base = um
  modified_base 2: mod_base = um
  modified_base 3: mod_base = OTHER; note = adenosine
  modified_base 4: mod_base = um
  modified_base 5: mod_base = OTHER; note = adenosine
  modified_base 6: mod_base = OTHER; note = guanosine
  modified_base 7: mod_base = OTHER; note = adenosine
  modified_base 8: mod_base = OTHER; note = guanosine
  modified_base 9: mod_base = OTHER; note = adenosine
  modified_base 10: mod_base = OTHER; note = adenosine
  modified_base 11: mod_base = cm
  modified_base 12: mod_base = OTHER; note = adenosine
  modified_base 13: mod_base = OTHER; note = adenosine
  modified_base 14: mod_base = OTHER; note = adenosine
  modified_base 15: mod_base = um
  modified_base 16: mod_base = um
  modified_base 17: mod_base = OTHER; note = adenosine
  modified_base 18: mod_base = OTHER; note = adenosine
  modified_base 19: mod_base = OTHER; note = adenosine
  modified_base 20: mod_base = OTHER; note = 2'-deoxythymidine
  modified_base 21: mod_base = OTHER; note = 2'-deoxythymidine
  source 1..21: mol_type = other RNA
ttatagagaacaaattaaatt

SEQ ID NO: 963 - RNA, 21 nt, synthetic construct
  modified_base 20..21: mod_base = OTHER; note = thymine
  modified_base 1: mod_base = um
  modified_base 2: mod_base = OTHER; note = adenosine
  modified_base 3: mod_base = um
  modified_base 4: mod_base = OTHER; note = adenosine
  modified_base 5: mod_base = OTHER; note = guanosine
  modified_base 6: mod_base = OTHER; note = adenosine
  modified_base 7: mod_base = OTHER; note = guanosine
  modified_base 8: mod_base = OTHER; note = adenosine
  modified_base 9: mod_base = OTHER; note = adenosine
  modified_base 10: mod_base = cm
  modified_base 11: mod_base = OTHER; note = adenosine
  modified_base 12: mod_base = OTHER; note = adenosine
  modified_base 13: mod_base = OTHER; note = adenosine
  modified_base 14: mod_base = um
  modified_base 15: mod_base = um
  modified_base 16: mod_base = OTHER; note = adenosine
  modified_base 17: mod_base = OTHER; note = adenosine
  modified_base 18: mod_base = OTHER; note = adenosine
  modified_base 19: mod_base = OTHER; note = adenosine
  modified_base 20: mod_base = OTHER; note = 2'-deoxythymidine
  modified_base 21: mod_base = OTHER; note = 2'-deoxythymidine
  source 1..21: mol_type = other RNA
tatagagaacaaattaaaatt

SEQ ID NO: 964 - RNA, 21 nt, synthetic construct
  modified_base 20..21: mod_base = OTHER; note = thymine
  modified_base 1: mod_base = OTHER; note = adenosine
  modified_base 2: mod_base = um
  modified_base 3: mod_base = OTHER; note = adenosine
  modified_base 4: mod_base = OTHER; note = guanosine
  modified_base 5: mod_base = OTHER; note = adenosine
  modified_base 6: mod_base = OTHER; note = guanosine
  modified_base 7: mod_base = OTHER; note = adenosine
  modified_base 8: mod_base = OTHER; note = adenosine
  modified_base 9: mod_base = cm
  modified_base 10: mod_base = OTHER; note = adenosine
  modified_base 11: mod_base = OTHER; note = adenosine
  modified_base 12: mod_base = OTHER; note = adenosine
  modified_base 13: mod_base = um
  modified_base 14: mod_base = um
  modified_base 15: mod_base = OTHER; note = adenosine
  modified_base 16: mod_base = OTHER; note = adenosine
  modified_base 17: mod_base = OTHER; note = adenosine
  modified_base 18: mod_base = OTHER; note = adenosine
  modified_base 19: mod_base = OTHER; note = guanosine
  modified_base 20: mod_base = OTHER; note = 2'-deoxythymidine
  modified_base 21: mod_base = OTHER; note = 2'-deoxythymidine
  source 1..21: mol_type = other RNA
atagagaacaaattaaaagtt

SEQ ID NO: 965 - RNA, 21 nt, synthetic construct
  modified_base 20..21: mod_base = OTHER; note = thymine
  modified_base 1: mod_base = um
  modified_base 2: mod_base = OTHER; note = adenosine
  modified_base 3: mod_base = OTHER; note = guanosine
  modified_base 4: mod_base = OTHER; note = adenosine
  modified_base 5: mod_base = OTHER; note = guanosine
  modified_base 6: mod_base = OTHER; note = adenosine
  modified_base 7: mod_base = OTHER; note = adenosine
  modified_base 8: mod_base = cm
  modified_base 9: mod_base = OTHER; note = adenosine
  modified_base 10: mod_base = OTHER; note = adenosine
  modified_base 11: mod_base = OTHER; note = adenosine
  modified_base 12: mod_base = um
  modified_base 13: mod_base = um
  modified_base 14: mod_base = OTHER; note = adenosine
  modified_base 15: mod_base = OTHER; note = adenosine
  modified_base 16: mod_base = OTHER; note = adenosine
  modified_base 17: mod_base = OTHER; note = adenosine
  modified_base 18: mod_base = OTHER; note = guanosine
  modified_base 19: mod_base = OTHER; note = adenosine
  modified_base 20: mod_base = OTHER; note = 2'-deoxythymidine
  modified_base 21: mod_base = OTHER; note = 2'-deoxythymidine
  source 1..21: mol_type = other RNA
tagagaacaaattaaaagatt

SEQ ID NO: 966 - RNA, 21 nt, synthetic construct
  modified_base 20..21: mod_base = OTHER; note = thymine
  modified_base 1: mod_base = OTHER; note = adenosine
  modified_base 2: mod_base = OTHER; note = guanosine
  modified_base 3: mod_base = OTHER; note = adenosine
  modified_base 4: mod_base = OTHER; note = guanosine
  modified_base 5: mod_base = OTHER; note = adenosine
  modified_base 6: mod_base = OTHER; note = adenosine
  modified_base 7: mod_base = cm
  modified_base 8: mod_base = OTHER; note = adenosine
  modified_base 9: mod_base = OTHER; note = adenosine
  modified_base 10: mod_base = OTHER; note = adenosine
  modified_base 11: mod_base = um
  modified_base 12: mod_base = um
  modified_base 13: mod_base = OTHER; note = adenosine
  modified_base 14: mod_base = OTHER; note = adenosine
  modified_base 15: mod_base = OTHER; note = adenosine
  modified_base 16: mod_base = OTHER; note = adenosine
  modified_base 17: mod_base = OTHER; note = guanosine
  modified_base 18: mod_base = OTHER; note = adenosine
  modified_base 19: mod_base = OTHER; note = guanosine
  modified_base 20: mod_base = OTHER; note = 2'-deoxythymidine
  modified_base 21: mod_base = OTHER; note = 2'-deoxythymidine
  source 1..21: mol_type = other RNA
agagaacaaattaaaagagtt

SEQ ID NO: 967 - RNA, 21 nt, synthetic construct
  modified_base 20..21: mod_base = OTHER; note = thymine
  modified_base 1: mod_base = OTHER; note = guanosine
  modified_base 2: mod_base = OTHER; note = adenosine
  modified_base 3: mod_base = OTHER; note = adenosine
  modified_base 4: mod_base = OTHER; note = guanosine
  modified_base 5: mod_base = OTHER; note = adenosine
  modified_base 6: mod_base = um
  modified_base 7: mod_base = OTHER; note = guanosine
  modified_base 8: mod_base = um
  modified_base 9: mod_base = OTHER; note = adenosine
  modified_base 10: mod_base = cm
  modified_base 11: mod_base = cm
  modified_base 12: mod_base = um
  modified_base 13: mod_base = OTHER; note = adenosine
  modified_base 14: mod_base = um
  modified_base 15: mod_base = OTHER; note = guanosine
  modified_base 16: mod_base = OTHER; note = guanosine
  modified_base 17: mod_base = um
  modified_base 18: mod_base = cm
  modified_base 19: mod_base = cm
  modified_base 20: mod_base = OTHER; note = 2'-deoxythymidine
  modified_base 21: mod_base = OTHER; note = 2'-deoxythymidine
  source 1..21: mol_type = other RNA
gaagatgtacctatggtcctt

SEQ ID NO: 968 - RNA, 21 nt, synthetic construct
  modified_base 20..21: mod_base = OTHER; note = thymine
  modified_base 1: mod_base = OTHER; note = adenosine
  modified_base 2: mod_base = OTHER; note = adenosine
  modified_base 3: mod_base = OTHER; note = guanosine
  modified_base 4: mod_base = OTHER; note = adenosine
  modified_base 5: mod_base = um
  modified_base 6: mod_base = OTHER; note = guanosine
  modified_base 7: mod_base = um
  modified_base 8: mod_base = OTHER; note = adenosine
  modified_base 9: mod_base = cm
  modified_base 10: mod_base = cm
  modified_base 11: mod_base = um
  modified_base 12: mod_base = OTHER; note = adenosine
  modified_base 13: mod_base = um
  modified_base 14: mod_base = OTHER; note = guanosine
  modified_base 15: mod_base = OTHER; note = guanosine
  modified_base 16: mod_base = um
  modified_base 17: mod_base = cm
  modified_base 18: mod_base = cm
  modified_base 19: mod_base = um
  modified_base 20: mod_base = OTHER; note = 2'-deoxythymidine
  modified_base 21: mod_base = OTHER; note = 2'-deoxythymidine
  source 1..21: mol_type = other RNA
aagatgtacctatggtccttt

SEQ ID NO: 969 - RNA, 21 nt, synthetic construct
  modified_base 20..21: mod_base = OTHER; note = thymine
  modified_base 1: mod_base = OTHER; note = adenosine
  modified_base 2: mod_base = OTHER; note = guanosine
  modified_base 3: mod_base = OTHER; note = adenosine
  modified_base 4: mod_base = um
  modified_base 5: mod_base = OTHER; note = guanosine
  modified_base 6: mod_base = um
  modified_base 7: mod_base = OTHER; note = adenosine
  modified_base 8: mod_base = cm
  modified_base 9: mod_base = cm
  modified_base 10: mod_base = um
  modified_base 11: mod_base = OTHER; note = adenosine
  modified_base 12: mod_base = um
  modified_base 13: mod_base = OTHER; note = guanosine
  modified_base 14: mod_base = OTHER; note = guanosine
  modified_base 15: mod_base = um
  modified_base 16: mod_base = cm
  modified_base 17: mod_base = cm
  modified_base 18: mod_base = um
  modified_base 19: mod_base = OTHER; note = adenosine
  modified_base 20: mod_base = OTHER; note = 2'-deoxythymidine
  modified_base 21: mod_base = OTHER; note = 2'-deoxythymidine
  source 1..21: mol_type = other RNA
agatgtacctatggtcctatt

SEQ ID NO: 970 - RNA, 21 nt, synthetic construct
  modified_base 20..21: mod_base = OTHER; note = thymine
  modified_base 1: mod_base = OTHER; note = guanosine
  modified_base 2: mod_base = OTHER; note = adenosine
  modified_base 3: mod_base = um
  modified_base 4: mod_base = OTHER; note = guanosine
  modified_base 5: mod_base = um
  modified_base 6: mod_base = OTHER; note = adenosine
  modified_base 7: mod_base = cm
  modified_base 8: mod_base = cm
  modified_base 9: mod_base = um
  modified_base 10: mod_base = OTHER; note = adenosine
  modified_base 11: mod_base = um
  modified_base 12: mod_base = OTHER; note = guanosine
  modified_base 13: mod_base = OTHER; note = guanosine
  modified_base 14: mod_base = um
  modified_base 15: mod_base = cm
  modified_base 16: mod_base = cm
  modified_base 17: mod_base = um
  modified_base 18: mod_base = OTHER; note = adenosine
  modified_base 19: mod_base = OTHER; note = guanosine
  modified_base 20: mod_base = OTHER; note = 2'-deoxythymidine
  modified_base 21: mod_base = OTHER; note = 2'-deoxythymidine
  source 1..21: mol_type = other RNA
gatgtacctatggtcctagtt

SEQ ID NO: 971 - RNA, 21 nt, synthetic construct
  modified_base 20..21: mod_base = OTHER; note = thymine
  modified_base 1: mod_base = OTHER; note = adenosine
  modified_base 2: mod_base = um
  modified_base 3: mod_base = OTHER; note = guanosine
  modified_base 4: mod_base = um
  modified_base 5: mod_base = OTHER; note = adenosine
  modified_base 6: mod_base = cm
  modified_base 7: mod_base = cm
  modified_base 8: mod_base = um
  modified_base 9: mod_base = OTHER; note = adenosine
  modified_base 10: mod_base = um
  modified_base 11: mod_base = OTHER; note = guanosine
  modified_base 12: mod_base = OTHER; note = guanosine
  modified_base 13: mod_base = um
  modified_base 14: mod_base = cm
  modified_base 15: mod_base = cm
  modified_base 16: mod_base = um
  modified_base 17: mod_base = OTHER; note = adenosine
  modified_base 18: mod_base = OTHER; note = guanosine
  modified_base 19: mod_base = um
  modified_base 20: mod_base = OTHER; note = 2'-deoxythymidine
  modified_base 21: mod_base = OTHER; note = 2'-deoxythymidine
  source 1..21: mol_type = other RNA
atgtacctatggtcctagttt

SEQ ID NO: 972 - RNA, 21 nt, synthetic construct
  modified_base 20..21: mod_base = OTHER; note = thymine
  modified_base 1: mod_base = um
  modified_base 2: mod_base = OTHER; note = guanosine
  modified_base 3: mod_base = um
  modified_base 4: mod_base = OTHER; note = adenosine
  modified_base 5: mod_base = cm
  modified_base 6: mod_base = cm
  modified_base 7: mod_base = um
  modified_base 8: mod_base = OTHER; note = adenosine
  modified_base 9: mod_base = um
  modified_base 10: mod_base = OTHER; note = guanosine
  modified_base 11: mod_base = OTHER; note = guanosine
  modified_base 12: mod_base = um
  modified_base 13: mod_base = cm
  modified_base 14: mod_base = cm
  modified_base 15: mod_base = um
  modified_base 16: mod_base = OTHER; note = adenosine
  modified_base 17: mod_base = OTHER; note = guanosine
  modified_base 18: mod_base = um
  modified_base 19: mod_base = OTHER; note = adenosine
  modified_base 20: mod_base = OTHER; note = 2'-deoxythymidine
  modified_base 21: mod_base = OTHER; note = 2'-deoxythymidine
  source 1..21: mol_type = other RNA
tgtacctatggtcctagtatt

SEQ ID NO: 973 - RNA, 21 nt, synthetic construct
  modified_base 20..21: mod_base = OTHER; note = thymine
  modified_base 1: mod_base = OTHER; note = guanosine
  modified_base 2: mod_base = um
  modified_base 3: mod_base = OTHER; note = adenosine
  modified_base 4: mod_base = cm
  modified_base 5: mod_base = cm
  modified_base 6: mod_base = um
  modified_base 7: mod_base = OTHER; note = adenosine
  modified_base 8: mod_base = um
  modified_base 9: mod_base = OTHER; note = guanosine
  modified_base 10: mod_base = OTHER; note = guanosine
  modified_base 11: mod_base = um
  modified_base 12: mod_base = cm
  modified_base 13: mod_base = cm
  modified_base 14: mod_base = um
  modified_base 15: mod_base = OTHER; note = adenosine
  modified_base 16: mod_base = OTHER; note = guanosine
  modified_base 17: mod_base = um
  modified_base 18: mod_base = OTHER; note = adenosine
  modified_base 19: mod_base = OTHER; note = guanosine
  modified_base 20: mod_base = OTHER; note = 2'-deoxythymidine
  modified_base 21: mod_base = OTHER; note = 2'-deoxythymidine
  source 1..21: mol_type = other RNA
gtacctatggtcctagtagtt

SEQ ID NO: 974 - RNA, 21 nt, synthetic construct
  modified_base 20..21: mod_base = OTHER; note = thymine
  modified_base 1: mod_base = um
  modified_base 2: mod_base = OTHER; note = adenosine
  modified_base 3: mod_base = cm
  modified_base 4: mod_base = cm
  modified_base 5: mod_base = um
  modified_base 6: mod_base = OTHER; note = adenosine
  modified_base 7: mod_base = um
  modified_base 8: mod_base = OTHER; note = guanosine
  modified_base 9: mod_base = OTHER; note = guanosine
  modified_base 10: mod_base = um
  modified_base 11: mod_base = cm
  modified_base 12: mod_base = cm
  modified_base 13: mod_base = um
  modified_base 14: mod_base = OTHER; note = adenosine
  modified_base 15: mod_base = OTHER; note = guanosine
  modified_base 16: mod_base = um
  modified_base 17: mod_base = OTHER; note = adenosine
  modified_base 18: mod_base = OTHER; note = guanosine
  modified_base 19: mod_base = OTHER; note = guanosine
  modified_base 20: mod_base = OTHER; note = 2'-deoxythymidine
  modified_base 21: mod_base = OTHER; note = 2'-deoxythymidine
  source 1..21: mol_type = other RNA
tacctatggtcctagtaggtt

SEQ ID NO: 975 - RNA, 21 nt, synthetic construct
  modified_base 20..21: mod_base = OTHER; note = thymine
  modified_base 1: mod_base = OTHER; note = adenosine
  modified_base 2: mod_base = cm
  modified_base 3: mod_base = cm
  modified_base 4: mod_base = um
  modified_base 5: mod_base = OTHER; note = adenosine
  modified_base 6: mod_base = um
  modified_base 7: mod_base = OTHER; note = guanosine
  modified_base 8: mod_base = OTHER; note = guanosine
  modified_base 9: mod_base = um
  modified_base 10: mod_base = cm
  modified_base 11: mod_base = cm
  modified_base 12: mod_base = um
  modified_base 13: mod_base = OTHER; note = adenosine
  modified_base 14: mod_base = OTHER; note = guanosine
  modified_base 15: mod_base = um
  modified_base 16: mod_base = OTHER; note = adenosine
  modified_base 17: mod_base = OTHER; note = guanosine
  modified_base 18: mod_base = OTHER; note = guanosine
  modified_base 19: mod_base = OTHER; note = adenosine
  modified_base 20: mod_base = OTHER; note = 2'-deoxythymidine
  modified_base 21: mod_base = OTHER; note = 2'-deoxythymidine
  source 1..21: mol_type = other RNA
acctatggtcctagtaggatt

SEQ ID NO: 976 - RNA, 21 nt, synthetic construct
  modified_base 20..21: mod_base = OTHER; note = thymine
  modified_base 1: mod_base = cm
  modified_base 2: mod_base = cm
  modified_base 3: mod_base = um
  modified_base 4: mod_base = OTHER; note = adenosine
  modified_base 5: mod_base = um
  modified_base 6: mod_base = OTHER; note = guanosine
  modified_base 7: mod_base = OTHER; note = guanosine
  modified_base 8: mod_base = um
  modified_base 9: mod_base = cm
  modified_base 10: mod_base = cm
  modified_base 11: mod_base = um
  modified_base 12: mod_base = OTHER; note = adenosine
  modified_base 13: mod_base = OTHER; note = guanosine
  modified_base 14: mod_base = um
  modified_base 15: mod_base = OTHER; note = adenosine
  modified_base 16: mod_base = OTHER; note = guanosine
  modified_base 17: mod_base = OTHER; note = guanosine
  modified_base 18: mod_base = OTHER; note = adenosine
  modified_base 19: mod_base = OTHER; note = adenosine
  modified_base 20: mod_base = OTHER; note = 2'-deoxythymidine
  modified_base 21: mod_base = OTHER; note = 2'-deoxythymidine
  source 1..21: mol_type = other RNA
cctatggtcctagtaggaatt

SEQ ID NO: 977 - RNA, 21 nt, synthetic construct
  modified_base 20..21: mod_base = OTHER; note = thymine
  modified_base 1: mod_base = cm
  modified_base 2: mod_base = um
  modified_base 3: mod_base = OTHER; note = adenosine
  modified_base 4: mod_base = um
  modified_base 5: mod_base = OTHER; note = guanosine
  modified_base 6: mod_base = OTHER; note = guanosine
  modified_base 7: mod_base = um
  modified_base 8: mod_base = cm
  modified_base 9: mod_base = cm
  modified_base 10: mod_base = um
  modified_base 11: mod_base = OTHER; note = adenosine
  modified_base 12: mod_base = OTHER; note = guanosine
  modified_base 13: mod_base = um
  modified_base 14: mod_base = OTHER; note = adenosine
  modified_base 15: mod_base = OTHER; note = guanosine
  modified_base 16: mod_base = OTHER; note = guanosine
  modified_base 17: mod_base = OTHER; note = adenosine
  modified_base 18: mod_base = OTHER; note = adenosine
  modified_base 19: mod_base = OTHER; note = adenosine
  modified_base 20: mod_base = OTHER; note = 2'-deoxythymidine
  modified_base 21: mod_base = OTHER; note = 2'-deoxythymidine
  source 1..21: mol_type = other RNA
ctatggtcctagtaggaaatt

SEQ ID NO: 978 - RNA, 21 nt, synthetic construct
  modified_base 20..21: mod_base = OTHER; note = thymine
  modified_base 1: mod_base = um
  modified_base 2: mod_base = OTHER; note = adenosine
  modified_base 3: mod_base = um
  modified_base 4: mod_base = OTHER; note = guanosine
  modified_base 5: mod_base = OTHER; note = guanosine
  modified_base 6: mod_base = um
  modified_base 7: mod_base = cm
  modified_base 8: mod_base = cm
  modified_base 9: mod_base = um
  modified_base 10: mod_base = OTHER; note = adenosine
  modified_base 11: mod_base = OTHER; note = guanosine
  modified_base 12: mod_base = um
  modified_base 13: mod_base = OTHER; note = adenosine
  modified_base 14: mod_base = OTHER; note = guanosine
  modified_base 15: mod_base = OTHER; note = guanosine
  modified_base 16: mod_base = OTHER; note = adenosine
  modified_base 17: mod_base = OTHER; note = adenosine
  modified_base 18: mod_base = OTHER; note = adenosine
  modified_base 19: mod_base = um
  modified_base 20: mod_base = OTHER; note = 2'-deoxythymidine
  modified_base 21: mod_base = OTHER; note = 2'-deoxythymidine
  source 1..21: mol_type = other RNA
tatggtcctagtaggaaattt

SEQ ID NO: 979 - RNA, 21 nt, synthetic construct
  modified_base 20..21: mod_base = OTHER; note = thymine
  modified_base 1: mod_base = OTHER; note = adenosine
  modified_base 2: mod_base = um
  modified_base 3: mod_base = OTHER; note = guanosine
  modified_base 4: mod_base = OTHER; note = guanosine
  modified_base 5: mod_base = um
  modified_base 6: mod_base = cm
  modified_base 7: mod_base = cm
  modified_base 8: mod_base = um
  modified_base 9: mod_base = OTHER; note = adenosine
  modified_base 10: mod_base = OTHER; note = guanosine
  modified_base 11: mod_base = um
  modified_base 12: mod_base = OTHER; note = adenosine
  modified_base 13: mod_base = OTHER; note = guanosine
  modified_base 14: mod_base = OTHER; note = guanosine
  modified_base 15: mod_base = OTHER; note = adenosine
  modified_base 16: mod_base = OTHER; note = adenosine
  modified_base 17: mod_base = OTHER; note = adenosine
  modified_base 18: mod_base = um
  modified_base 19: mod_base = OTHER; note = adenosine
  modified_base 20: mod_base = OTHER; note = 2'-deoxythymidine
  modified_base 21: mod_base = OTHER; note = 2'-deoxythymidine
  source 1..21: mol_type = other RNA
atggtcctagtaggaaatatt

SEQ ID NO: 980 - RNA, 21 nt, synthetic construct
  modified_base 20..21: mod_base = OTHER; note = thymine
  modified_base 1: mod_base = um
  modified_base 2: mod_base = OTHER; note = guanosine
  modified_base 3: mod_base = OTHER; note = guanosine
  modified_base 4: mod_base = um
  modified_base 5: mod_base = cm
  modified_base 6: mod_base = cm
  modified_base 7: mod_base = um
  modified_base 8: mod_base = OTHER; note = adenosine
  modified_base 9: mod_base = OTHER; note = guanosine
  modified_base 10: mod_base = um
  modified_base 11: mod_base = OTHER; note = adenosine
  modified_base 12: mod_base = OTHER; note = guanosine
  modified_base 13: mod_base = OTHER; note = guanosine
  modified_base 14: mod_base = OTHER; note = adenosine
  modified_base 15: mod_base = OTHER; note = adenosine
  modified_base 16: mod_base = OTHER; note = adenosine
  modified_base 17: mod_base = um
  modified_base 18: mod_base = OTHER; note = adenosine
  modified_base 19: mod_base = OTHER; note = adenosine
  modified_base 20: mod_base = OTHER; note = 2'-deoxythymidine
  modified_base 21: mod_base = OTHER; note = 2'-deoxythymidine
  source 1..21: mol_type = other RNA
tggtcctagtaggaaataatt

SEQ ID NO: 981 - RNA, 21 nt, synthetic construct
  modified_base 20..21: mod_base = OTHER; note = thymine
  modified_base 1: mod_base = OTHER; note = guanosine
  modified_base 2: mod_base = OTHER; note = guanosine
  modified_base 3: mod_base = um
  modified_base 4: mod_base = cm
  modified_base 5: mod_base = cm
  modified_base 6: mod_base = um
  modified_base 7: mod_base = OTHER; note = adenosine
  modified_base 8: mod_base = OTHER; note = guanosine
  modified_base 9: mod_base = um
  modified_base 10: mod_base = OTHER; note = adenosine
  modified_base 11: mod_base = OTHER; note = guanosine
  modified_base 12: mod_base = OTHER; note = guanosine
  modified_base 13: mod_base = OTHER; note = adenosine
  modified_base 14: mod_base = OTHER; note = adenosine
  modified_base 15: mod_base = OTHER; note = adenosine
  modified_base 16: mod_base = um
  modified_base 17: mod_base = OTHER; note = adenosine
  modified_base 18: mod_base = OTHER; note = adenosine
  modified_base 19: mod_base = OTHER; note = adenosine
  modified_base 20: mod_base = OTHER; note = 2'-deoxythymidine
  modified_base 21: mod_base = OTHER; note = 2'-deoxythymidine
  source 1..21: mol_type = other RNA
ggtcctagtaggaaataaatt

SEQ ID NO: 982 - RNA, 21 nt, synthetic construct
  modified_base 20..21: mod_base = OTHER; note = thymine
  modified_base 1: mod_base = OTHER; note = guanosine
  modified_base 2: mod_base = um
  modified_base 3: mod_base = cm
  modified_base 4: mod_base = cm
  modified_base 5: mod_base = um
  modified_base 6: mod_base = OTHER; note = adenosine
  modified_base 7: mod_base = OTHER; note = guanosine
  modified_base 8: mod_base = um
  modified_base 9: mod_base = OTHER; note = adenosine
  modified_base 10: mod_base = OTHER; note = guanosine
  modified_base 11: mod_base = OTHER; note = guanosine
  modified_base 12: mod_base = OTHER; note = adenosine
  modified_base 13: mod_base = OTHER; note = adenosine
  modified_base 14: mod_base = OTHER; note = adenosine
  modified_base 15: mod_base = um
  modified_base 16: mod_base = OTHER; note = adenosine
  modified_base 17: mod_base = OTHER; note = adenosine
  modified_base 18: mod_base = OTHER; note = adenosine
  modified_base 19: mod_base = um
  modified_base 20: mod_base = OTHER; note = 2'-deoxythymidine
  modified_base 21: mod_base = OTHER; note = 2'-deoxythymidine
  source 1..21: mol_type = other RNA
gtcctagtaggaaataaattt

SEQ ID NO: 983 - RNA, 21 nt, synthetic construct
  modified_base 20..21: mod_base = OTHER; note = thymine
  modified_base 1: mod_base = um
  modified_base 2: mod_base = cm
  modified_base 3: mod_base = cm
  modified_base 4: mod_base = um
  modified_base 5: mod_base = OTHER; note = adenosine
  modified_base 6: mod_base = OTHER; note = guanosine
  modified_base 7: mod_base = um
  modified_base 8: mod_base = OTHER; note = adenosine
  modified_base 9: mod_base = OTHER; note = guanosine
  modified_base 10: mod_base = OTHER; note = guanosine
  modified_base 11: mod_base = OTHER; note = adenosine
  modified_base 12: mod_base = OTHER; note = adenosine
  modified_base 13: mod_base = OTHER; note = adenosine
  modified_base 14: mod_base = um
  modified_base 15: mod_base = OTHER; note = adenosine
  modified_base 16: mod_base = OTHER; note = adenosine
  modified_base 17: mod_base = OTHER; note = adenosine
  modified_base 18: mod_base = um
  modified_base 19: mod_base = OTHER; note = guanosine
  modified_base 20: mod_base = OTHER; note = 2'-deoxythymidine
  modified_base 21: mod_base = OTHER; note = 2'-deoxythymidine
  source 1..21: mol_type = other RNA
tcctagtaggaaataaatgtt

SEQ ID NO: 984 - RNA, 21 nt, synthetic construct
  modified_base 20..21: mod_base = OTHER; note = thymine
  modified_base 1: mod_base = cm
  modified_base 2: mod_base = cm
  modified_base 3: mod_base = um
  modified_base 4: mod_base = OTHER; note = adenosine
  modified_base 5: mod_base = OTHER; note = guanosine
  modified_base 6: mod_base = um
  modified_base 7: mod_base = OTHER; note = adenosine
  modified_base 8: mod_base = OTHER; note = guanosine
  modified_base 9: mod_base = OTHER; note = guanosine
  modified_base 10: mod_base = OTHER; note = adenosine
  modified_base 11: mod_base = OTHER; note = adenosine
  modified_base 12: mod_base = OTHER; note = adenosine
  modified_base 13: mod_base = um
  modified_base 14: mod_base = OTHER; note = adenosine
  modified_base 15: mod_base = OTHER; note = adenosine
  modified_base 16: mod_base = OTHER; note = adenosine
  modified_base 17: mod_base = um
  modified_base 18: mod_base = OTHER; note = guanosine
  modified_base 19: mod_base = um
  modified_base 20: mod_base = OTHER; note = 2'-deoxythymidine
  modified_base 21: mod_base = OTHER; note = 2'-deoxythymidine
  source 1..21: mol_type = other RNA
cctagtaggaaataaatgttt

SEQ ID NO: 985 - RNA, 21 nt, synthetic construct
  modified_base 20..21: mod_base = OTHER; note = thymine
  modified_base 1: mod_base = cm
  modified_base 2: mod_base = um
  modified_base 3: mod_base = OTHER; note = adenosine
  modified_base 4: mod_base = OTHER; note = guanosine
  modified_base 5: mod_base = um
  modified_base 6: mod_base = OTHER; note = adenosine
  modified_base 7: mod_base = OTHER; note = guanosine
  modified_base 8: mod_base = OTHER; note = guanosine
  modified_base 9: mod_base = OTHER; note = adenosine
  modified_base 10: mod_base = OTHER; note = adenosine
  modified_base 11: mod_base = OTHER; note = adenosine
  modified_base 12: mod_base = um
  modified_base 13: mod_base = OTHER; note = adenosine
  modified_base 14: mod_base = OTHER; note = adenosine
  modified_base 15: mod_base = OTHER; note = adenosine
  modified_base 16: mod_base = um
  modified_base 17: mod_base = OTHER; note = guanosine
  modified_base 18: mod_base = um
  modified_base 19: mod_base = OTHER; note = guanosine
  modified_base 20: mod_base = OTHER; note = 2'-deoxythymidine
  modified_base 21: mod_base = OTHER; note = 2'-deoxythymidine
  source 1..21: mol_type = other RNA
ctagtaggaaataaatgtgtt

SEQ ID NO: 986 - RNA, 21 nt, synthetic construct
  modified_base 20..21: mod_base = OTHER; note = thymine
  modified_base 1: mod_base = um
  modified_base 2: mod_base = OTHER; note = adenosine
  modified_base 3: mod_base = OTHER; note = guanosine
  modified_base 4: mod_base = um
  modified_base 5: mod_base = OTHER; note = adenosine
  modified_base 6: mod_base = OTHER; note = guanosine
  modified_base 7: mod_base = OTHER; note = guanosine
  modified_base 8: mod_base = OTHER; note = adenosine
  modified_base 9: mod_base = OTHER; note = adenosine
  modified_base 10: mod_base = OTHER; note = adenosine
  modified_base 11: mod_base = um
  modified_base 12: mod_base = OTHER; note = adenosine
  modified_base 13: mod_base = OTHER; note = adenosine
  modified_base 14: mod_base = OTHER; note = adenosine
  modified_base 15: mod_base = um
  modified_base 16: mod_base = OTHER; note = guanosine
  modified_base 17: mod_base = um
  modified_base 18: mod_base = OTHER; note = guanosine
  modified_base 19: mod_base = OTHER; note = adenosine
  modified_base 20: mod_base = OTHER; note = 2'-deoxythymidine
  modified_base 21: mod_base = OTHER; note = 2'-deoxythymidine
  source 1..21: mol_type = other RNA
tagtaggaaataaatgtgatt

SEQ ID NO: 987 - RNA, 21 nt, synthetic construct
  modified_base 20..21: mod_base = OTHER; note = thymine
  modified_base 1: mod_base = OTHER; note = adenosine
  modified_base 2: mod_base = OTHER; note = guanosine
  modified_base 3: mod_base = um
  modified_base 4: mod_base = OTHER; note = adenosine
  modified_base 5: mod_base = OTHER; note = guanosine
  modified_base 6: mod_base = OTHER; note = guanosine
  modified_base 7: mod_base = OTHER; note = adenosine
  modified_base 8: mod_base = OTHER; note = adenosine
  modified_base 9: mod_base = OTHER; note = adenosine
  modified_base 10: mod_base = um
  modified_base 11: mod_base = OTHER; note = adenosine
  modified_base 12: mod_base = OTHER; note = adenosine
  modified_base 13: mod_base = OTHER; note = adenosine
  modified_base 14: mod_base = um
  modified_base 15: mod_base = OTHER; note = guanosine
  modified_base 16: mod_base = um
  modified_base 17: mod_base = OTHER; note = guanosine
  modified_base 18: mod_base = OTHER; note = adenosine
  modified_base 19: mod_base = um
  modified_base 20: mod_base = OTHER; note = 2'-deoxythymidine
  modified_base 21: mod_base = OTHER; note = 2'-deoxythymidine
  source 1..21: mol_type = other RNA
agtaggaaataaatgtgattt

SEQ ID NO: 988 - RNA, 21 nt, synthetic construct
  modified_base 20..21: mod_base = OTHER; note = thymine
  modified_base 1: mod_base = OTHER; note = guanosine
  modified_base 2: mod_base = OTHER; note = guanosine
  modified_base 3: mod_base = OTHER; note = adenosine
  modified_base 4: mod_base = OTHER; note = adenosine
  modified_base 5: mod_base = um
  modified_base 6: mod_base = um
  modified_base 7: mod_base = cm
  modified_base 8: mod_base = cm
  modified_base 9: mod_base = um
  modified_base 10: mod_base = um
  modified_base 11: mod_base = um
  modified_base 12: mod_base = um
  modified_base 13: mod_base = OTHER; note = adenosine
  modified_base 14: mod_base = um
  modified_base 15: mod_base = um
  modified_base 16: mod_base = OTHER; note = guanosine
  modified_base 17: mod_base = OTHER; note = adenosine
  modified_base 18: mod_base = OTHER; note = adenosine
  modified_base 19: mod_base = OTHER; note = adenosine
  modified_base 20: mod_base = OTHER; note = 2'-deoxythymidine
  modified_base 21: mod_base = OTHER; note = 2'-deoxythymidine
  source 1..21: mol_type = other RNA
ggaattccttttattgaaatt

SEQ ID NO: 989 - RNA, 21 nt, synthetic construct
  modified_base 20..21: mod_base = OTHER; note = thymine
  modified_base 1: mod_base = OTHER; note = guanosine
  modified_base 2: mod_base = OTHER; note = adenosine
  modified_base 3: mod_base = OTHER; note = adenosine
  modified_base 4: mod_base = um
  modified_base 5: mod_base = um
  modified_base 6: mod_base = cm
  modified_base 7: mod_base = cm
  modified_base 8: mod_base = um
  modified_base 9: mod_base = um
  modified_base 10: mod_base = um
  modified_base 11: mod_base = um
  modified_base 12: mod_base = OTHER; note = adenosine
  modified_base 13: mod_base = um
  modified_base 14: mod_base = um
  modified_base 15: mod_base = OTHER; note = guanosine
  modified_base 16: mod_base = OTHER; note = adenosine
  modified_base 17: mod_base = OTHER; note = adenosine
  modified_base 18: mod_base = OTHER; note = adenosine
  modified_base 19: mod_base = cm
  modified_base 20: mod_base = OTHER; note = 2'-deoxythymidine
  modified_base 21: mod_base = OTHER; note = 2'-deoxythymidine
  source 1..21: mol_type = other RNA
gaattccttttattgaaactt

SEQ ID NO: 990 - RNA, 21 nt, synthetic construct
  modified_base 20..21: mod_base = OTHER; note = thymine
  modified_base 1: mod_base = OTHER; note = adenosine
  modified_base 2: mod_base = OTHER; note = adenosine
  modified_base 3: mod_base = um
  modified_base 4: mod_base = um
  modified_base 5: mod_base = cm
  modified_base 6: mod_base = cm
  modified_base 7: mod_base = um
  modified_base 8: mod_base = um
  modified_base 9: mod_base = um
  modified_base 10: mod_base = um
  modified_base 11: mod_base = OTHER; note = adenosine
  modified_base 12: mod_base = um
  modified_base 13: mod_base = um
  modified_base 14: mod_base = OTHER; note = guanosine
  modified_base 15: mod_base = OTHER; note = adenosine
  modified_base 16: mod_base = OTHER; note = adenosine
  modified_base 17: mod_base = OTHER; note = adenosine
  modified_base 18: mod_base = cm
  modified_base 19: mod_base = OTHER; note = adenosine
  modified_base 20: mod_base = OTHER; note = 2'-deoxythymidine
  modified_base 21: mod_base = OTHER; note = 2'-deoxythymidine
  source 1..21: mol_type = other RNA
aattccttttattgaaacatt

SEQ ID NO: 991 - RNA, 21 nt, synthetic construct
  modified_base 20..21: mod_base = OTHER; note = thymine
  modified_base 1: mod_base = OTHER; note = adenosine
  modified_base 2: mod_base = um
  modified_base 3: mod_base = um
  modified_base 4: mod_base = cm
  modified_base 5: mod_base = cm
  modified_base 6: mod_base = um
  modified_base 7: mod_base = um
  modified_base 8: mod_base = um
  modified_base 9: mod_base = um
  modified_base 10: mod_base = OTHER; note = adenosine
  modified_base 11: mod_base = um
  modified_base 12: mod_base = um
  modified_base 13: mod_base = OTHER; note = guanosine
  modified_base 14: mod_base = OTHER; note = adenosine
  modified_base 15: mod_base = OTHER; note = adenosine
  modified_base 16: mod_base = OTHER; note = adenosine
  modified_base 17: mod_base = cm
  modified_base 18: mod_base = OTHER; note = adenosine
  modified_base 19: mod_base = um
  modified_base 20: mod_base = OTHER; note = 2'-deoxythymidine
  modified_base 21: mod_base = OTHER; note = 2'-deoxythymidine
  source 1..21: mol_type = other RNA
attccttttattgaaacattt

SEQ ID NO: 992 - RNA, 21 nt, synthetic construct
  modified_base 20..21: mod_base = OTHER; note = thymine
  modified_base 1: mod_base = um
  modified_base 2: mod_base = um
  modified_base 3: mod_base = cm
  modified_base 4: mod_base = cm
  modified_base 5: mod_base = um
  modified_base 6: mod_base = um
  modified_base 7: mod_base = um
  modified_base 8: mod_base = um
  modified_base 9: mod_base = OTHER; note = adenosine
  modified_base 10: mod_base = um
  modified_base 11: mod_base = um
  modified_base 12: mod_base = OTHER; note = guanosine
  modified_base 13: mod_base = OTHER; note = adenosine
  modified_base 14: mod_base = OTHER; note = adenosine
  modified_base 15: mod_base = OTHER; note = adenosine
  modified_base 16: mod_base = cm
  modified_base 17: mod_base = OTHER; note = adenosine
  modified_base 18: mod_base = um
  modified_base 19: mod_base = cm
  modified_base 20: mod_base = OTHER; note = 2'-deoxythymidine
  modified_base 21: mod_base = OTHER; note = 2'-deoxythymidine
  source 1..21: mol_type = other RNA
ttccttttattgaaacatctt

SEQ ID NO: 993 - RNA, 21 nt, synthetic construct
  modified_base 20..21: mod_base = OTHER; note = thymine
  modified_base 1: mod_base = um
  modified_base 2: mod_base = cm
  modified_base 3: mod_base = cm
  modified_base 4: mod_base = um
  modified_base 5: mod_base = um
  modified_base 6: mod_base = um
  modified_base 7: mod_base = um
  modified_base 8: mod_base = OTHER; note = adenosine
  modified_base 9: mod_base = um
  modified_base 10: mod_base = um
  modified_base 11: mod_base = OTHER; note = guanosine
  modified_base 12: mod_base = OTHER; note = adenosine
  modified_base 13: mod_base = OTHER; note = adenosine
  modified_base 14: mod_base = OTHER; note = adenosine
  modified_base 15: mod_base = cm
  modified_base 16: mod_base = OTHER; note = adenosine
  modified_base 17: mod_base = um
  modified_base 18: mod_base = cm
  modified_base 19: mod_base = OTHER; note = adenosine
  modified_base 20: mod_base = OTHER; note = 2'-deoxythymidine
  modified_base 21: mod_base = OTHER; note = 2'-deoxythymidine
  source 1..21: mol_type = other RNA
tccttttattgaaacatcatt

SEQ ID NO: 994 - RNA, 21 nt, synthetic construct
  modified_base 20..21: mod_base = OTHER; note = thymine
  modified_base 1: mod_base = cm
  modified_base 2: mod_base = cm
  modified_base 3: mod_base = um
  modified_base 4: mod_base = um
  modified_base 5: mod_base = um
  modified_base 6: mod_base = um
  modified_base 7: mod_base = OTHER; note = adenosine
  modified_base 8: mod_base = um
  modified_base 9: mod_base = um
  modified_base 10: mod_base = OTHER; note = guanosine
  modified_base 11: mod_base = OTHER; note = adenosine
  modified_base 12: mod_base = OTHER; note = adenosine
  modified_base 13: mod_base = OTHER; note = adenosine
  modified_base 14: mod_base = cm
  modified_base 15: mod_base = OTHER; note = adenosine
  modified_base 16: mod_base = um
  modified_base 17: mod_base = cm
  modified_base 18: mod_base = OTHER; note = adenosine
  modified_base 19: mod_base = OTHER; note = guanosine
  modified_base 20: mod_base = OTHER; note = 2'-deoxythymidine
  modified_base 21: mod_base = OTHER; note = 2'-deoxythymidine
  source 1..21: mol_type = other RNA
ccttttattgaaacatcagtt

SEQ ID NO: 995 - RNA, 21 nt, synthetic construct
  modified_base 20..21: mod_base = OTHER; note = thymine
  modified_base 1: mod_base = cm
  modified_base 2: mod_base = um
  modified_base 3: mod_base = um
  modified_base 4: mod_base = um
  modified_base 5: mod_base = um
  modified_base 6: mod_base = OTHER; note = adenosine
  modified_base 7: mod_base = um
  modified_base 8: mod_base = um
  modified_base 9: mod_base = OTHER; note = guanosine
  modified_base 10: mod_base = OTHER; note = adenosine
  modified_base 11: mod_base = OTHER; note = adenosine
  modified_base 12: mod_base = OTHER; note = adenosine
  modified_base 13: mod_base = cm
  modified_base 14: mod_base = OTHER; note = adenosine
  modified_base 15: mod_base = um
  modified_base 16: mod_base = cm
  modified_base 17: mod_base = OTHER; note = adenosine
  modified_base 18: mod_base = OTHER; note = guanosine
  modified_base 19: mod_base = cm
  modified_base 20: mod_base = OTHER; note = 2'-deoxythymidine
  modified_base 21: mod_base = OTHER; note = 2'-deoxythymidine
  source 1..21: mol_type = other RNA
cttttattgaaacatcagctt

SEQ ID NO: 996 - RNA, 21 nt, synthetic construct
  modified_base 20..21: mod_base = OTHER; note = thymine
  modified_base 1: mod_base = um
  modified_base 2: mod_base = um
  modified_base 3: mod_base = um
  modified_base 4: mod_base = um
  modified_base 5: mod_base = OTHER; note = adenosine
  modified_base 6: mod_base = um
  modified_base 7: mod_base = um
  modified_base 8: mod_base = OTHER; note = guanosine
  modified_base 9: mod_base = OTHER; note = adenosine
  modified_base 10: mod_base = OTHER; note = adenosine
  modified_base 11: mod_base = OTHER; note = adenosine
  modified_base 12: mod_base = cm
  modified_base 13: mod_base = OTHER; note = adenosine
  modified_base 14: mod_base = um
  modified_base 15: mod_base = cm
  modified_base 16: mod_base = OTHER; note = adenosine
  modified_base 17: mod_base = OTHER; note = guanosine
  modified_base 18: mod_base = cm
  modified_base 19: mod_base = OTHER; note = adenosine
  modified_base 20: mod_base = OTHER; note = 2'-deoxythymidine
  modified_base 21: mod_base = OTHER; note = 2'-deoxythymidine
  source 1..21: mol_type = other RNA
ttttattgaaacatcagcatt

SEQ ID NO: 997 - RNA, 21 nt, synthetic construct
  modified_base 20..21: mod_base = OTHER; note = thymine
  modified_base 1: mod_base = um
  modified_base 2: mod_base = um
  modified_base 3: mod_base = um
  modified_base 4: mod_base = OTHER; note = adenosine
  modified_base 5: mod_base = um
  modified_base 6: mod_base = um
  modified_base 7: mod_base = OTHER; note = guanosine
  modified_base 8: mod_base = OTHER; note = adenosine
  modified_base 9: mod_base = OTHER; note = adenosine
  modified_base 10: mod_base = OTHER; note = adenosine
  modified_base 11: mod_base = cm
  modified_base 12: mod_base = OTHER; note = adenosine
  modified_base 13: mod_base = um
  modified_base 14: mod_base = cm
  modified_base 15: mod_base = OTHER; note = adenosine
  modified_base 16: mod_base = OTHER; note = guanosine
  modified_base 17: mod_base = cm
  modified_base 18: mod_base = OTHER; note = adenosine
  modified_base 19: mod_base = OTHER; note = adenosine
  modified_base 20: mod_base = OTHER; note = 2'-deoxythymidine
  modified_base 21: mod_base = OTHER; note = 2'-deoxythymidine
  source 1..21: mol_type = other RNA
tttattgaaacatcagcaatt

SEQ ID NO: 998 - RNA, 21 nt, synthetic construct
  modified_base 20..21: mod_base = OTHER; note = thymine
  modified_base 1: mod_base = um
  modified_base 2: mod_base = um
  modified_base 3: mod_base = OTHER; note = adenosine
  modified_base 4: mod_base = um
  modified_base 5: mod_base = um
  modified_base 6: mod_base = OTHER; note = guanosine
  modified_base 7: mod_base = OTHER; note = adenosine
  modified_base 8: mod_base = OTHER; note = adenosine
  modified_base 9: mod_base = OTHER; note = adenosine
  modified_base 10: mod_base = cm
  modified_base 11: mod_base = OTHER; note = adenosine
  modified_base 12: mod_base = um
  modified_base 13: mod_base = cm
  modified_base 14: mod_base = OTHER; note = adenosine
  modified_base 15: mod_base = OTHER; note = guanosine
  modified_base 16: mod_base = cm
  modified_base 17: mod_base = OTHER; note = adenosine
  modified_base 18: mod_base = OTHER; note = adenosine
  modified_base 19: mod_base = OTHER; note = adenosine
  modified_base 20: mod_base = OTHER; note = 2'-deoxythymidine
  modified_base 21: mod_base = OTHER; note = 2'-deoxythymidine
  source 1..21: mol_type = other RNA
ttattgaaacatcagcaaatt

SEQ ID NO: 999 - RNA, 21 nt, synthetic construct
  modified_base 20..21: mod_base = OTHER; note = thymine
  modified_base 1: mod_base = um
  modified_base 2: mod_base = OTHER; note = adenosine
  modified_base 3: mod_base = um
  modified_base 4: mod_base = um
  modified_base 5: mod_base = OTHER; note = guanosine
  modified_base 6: mod_base = OTHER; note = adenosine
  modified_base 7: mod_base = OTHER; note = adenosine
  modified_base 8: mod_base = OTHER; note = adenosine
  modified_base 9: mod_base = cm
  modified_base 10: mod_base = OTHER; note = adenosine
  modified_base 11: mod_base = um
  modified_base 12: mod_base = cm
  modified_base 13: mod_base = OTHER; note = adenosine
  modified_base 14: mod_base = OTHER; note = guanosine
  modified_base 15: mod_base = cm
  modified_base 16: mod_base = OTHER; note = adenosine
  modified_base 17: mod_base = OTHER; note = adenosine
  modified_base 18: mod_base = OTHER; note = adenosine
  modified_base 19: mod_base = OTHER; note = guanosine
  modified_base 20: mod_base = OTHER; note = 2'-deoxythymidine
  modified_base 21: mod_base = OTHER; note = 2'-deoxythymidine
  source 1..21: mol_type = other RNA
tattgaaacatcagcaaagtt

SEQ ID NO: 1000 - RNA, 21 nt, synthetic construct
  modified_base 20..21: mod_base = OTHER; note = thymine
  modified_base 1: mod_base = OTHER; note = adenosine
  modified_base 2: mod_base = um
  modified_base 3: mod_base = um
  modified_base 4: mod_base = OTHER; note = guanosine
  modified_base 5: mod_base = OTHER; note = adenosine
  modified_base 6: mod_base = OTHER; note = adenosine
  modified_base 7: mod_base = OTHER; note = adenosine
  modified_base 8: mod_base = cm
  modified_base 9: mod_base = OTHER; note = adenosine
  modified_base 10: mod_base = um
  modified_base 11: mod_base = cm
  modified_base 12: mod_base = OTHER; note = adenosine
  modified_base 13: mod_base = OTHER; note = guanosine
  modified_base 14: mod_base = cm
  modified_base 15: mod_base = OTHER; note = adenosine
  modified_base 16: mod_base = OTHER; note = adenosine
  modified_base 17: mod_base = OTHER; note = adenosine
  modified_base 18: mod_base = OTHER; note = guanosine
  modified_base 19: mod_base = OTHER; note = adenosine
  modified_base 20: mod_base = OTHER; note = 2'-deoxythymidine
  modified_base 21: mod_base = OTHER; note = 2'-deoxythymidine
  source 1..21: mol_type = other RNA
attgaaacatcagcaaagatt

SEQ ID NO: 1001 - RNA, 21 nt, synthetic construct
  modified_base 20..21: mod_base = OTHER; note = thymine
  modified_base 1: mod_base = um
  modified_base 2: mod_base = um
  modified_base 3: mod_base = OTHER; note = guanosine
  modified_base 4: mod_base = OTHER; note = adenosine
  modified_base 5: mod_base = OTHER; note = adenosine
  modified_base 6: mod_base = OTHER; note = adenosine
  modified_base 7: mod_base = cm
  modified_base 8: mod_base = OTHER; note = adenosine
  modified_base 9: mod_base = um
  modified_base 10: mod_base = cm
  modified_base 11: mod_base = OTHER; note = adenosine
  modified_base 12: mod_base = OTHER; note = guanosine
  modified_base 13: mod_base = cm
  modified_base 14: mod_base = OTHER; note = adenosine
  modified_base 15: mod_base = OTHER; note = adenosine
  modified_base 16: mod_base = OTHER; note = adenosine
  modified_base 17: mod_base = OTHER; note = guanosine
  modified_base 18: mod_base = OTHER; note = adenosine
  modified_base 19: mod_base = cm
  modified_base 20: mod_base = OTHER; note = 2'-deoxythymidine
  modified_base 21: mod_base = OTHER; note = 2'-deoxythymidine
  source 1..21: mol_type = other RNA
ttgaaacatcagcaaagactt

SEQ ID NO: 1002 - RNA, 21 nt, synthetic construct
  modified_base 20..21: mod_base = OTHER; note = thymine
  modified_base 1: mod_base = um
  modified_base 2: mod_base = OTHER; note = guanosine
  modified_base 3: mod_base = OTHER; note = adenosine
  modified_base 4: mod_base = OTHER; note = adenosine
  modified_base 5: mod_base = OTHER; note = adenosine
  modified_base 6: mod_base = cm
  modified_base 7: mod_base = OTHER; note = adenosine
  modified_base 8: mod_base = um
  modified_base 9: mod_base = cm
  modified_base 10: mod_base = OTHER; note = adenosine
  modified_base 11: mod_base = OTHER; note = guanosine
  modified_base 12: mod_base = cm
  modified_base 13: mod_base = OTHER; note = adenosine
  modified_base 14: mod_base = OTHER; note = adenosine
  modified_base 15: mod_base = OTHER; note = adenosine
  modified_base 16: mod_base = OTHER; note = guanosine
  modified_base 17: mod_base = OTHER; note = adenosine
  modified_base 18: mod_base = cm
  modified_base 19: mod_base = OTHER; note = adenosine
  modified_base 20: mod_base = OTHER; note = 2'-deoxythymidine
  modified_base 21: mod_base = OTHER; note = 2'-deoxythymidine
  source 1..21: mol_type = other RNA
tgaaacatcagcaaagacatt

SEQ ID NO: 1003 - RNA, 21 nt, synthetic construct
  modified_base 20..21: mod_base = OTHER; note = thymine
  modified_base 1: mod_base = OTHER; note = guanosine
  modified_base 2: mod_base = OTHER; note = adenosine
  modified_base 3: mod_base = OTHER; note = adenosine
  modified_base 4: mod_base = OTHER; note = adenosine
  modified_base 5: mod_base = cm
  modified_base 6: mod_base = OTHER; note = adenosine
  modified_base 7: mod_base = um
  modified_base 8: mod_base = cm
  modified_base 9: mod_base = OTHER; note = adenosine
  modified_base 10: mod_base = OTHER; note = guanosine
  modified_base 11: mod_base = cm
  modified_base 12: mod_base = OTHER; note = adenosine
  modified_base 13: mod_base = OTHER; note = adenosine
  modified_base 14: mod_base = OTHER; note = adenosine
  modified_base 15: mod_base = OTHER; note = guanosine
  modified_base 16: mod_base = OTHER; note = adenosine
  modified_base 17: mod_base = cm
  modified_base 18: mod_base = OTHER; note = adenosine
  modified_base 19: mod_base = OTHER; note = adenosine
  modified_base 20: mod_base = OTHER; note = 2'-deoxythymidine
  modified_base 21: mod_base = OTHER; note = 2'-deoxythymidine
  source 1..21: mol_type = other RNA
gaaacatcagcaaagacaatt

SEQ ID NO: 1004 - RNA, 21 nt, synthetic construct
  modified_base 20..21: mod_base = OTHER; note = thymine
  modified_base 1: mod_base = OTHER; note = adenosine
  modified_base 2: mod_base = um
  modified_base 3: mod_base = OTHER; note = guanosine
  modified_base 4: mod_base = OTHER; note = adenosine
  modified_base 5: mod_base = cm
  modified_base 6: mod_base = um
  modified_base 7: mod_base = OTHER; note = guanosine
  modified_base 8: mod_base = OTHER; note = adenosine
  modified_base 9: mod_base = OTHER; note = adenosine
  modified_base 10: mod_base = um
  modified_base 11: mod_base = OTHER; note = adenosine
  modified_base 12: mod_base = um
  modified_base 13: mod_base = OTHER; note = adenosine
  modified_base 14: mod_base = OTHER; note = adenosine
  modified_base 15: mod_base = OTHER; note = adenosine
  modified_base 16: mod_base = cm
  modified_base 17: mod_base = um
  modified_base 18: mod_base = um
  modified_base 19: mod_base = OTHER; note = guanosine
  modified_base 20: mod_base = OTHER; note = 2'-deoxythymidine
  modified_base 21: mod_base = OTHER; note = 2'-deoxythymidine
  source 1..21: mol_type = other RNA
atgactgaatataaacttgtt

SEQ ID NO: 1005 - RNA, 21 nt, synthetic construct
  modified_base 20..21: mod_base = OTHER; note = thymine
  modified_base 1: mod_base = um
  modified_base 2: mod_base = OTHER; note = guanosine
  modified_base 3: mod_base = OTHER; note = adenosine
  modified_base 4: mod_base = cm
  modified_base 5: mod_base = um
  modified_base 6: mod_base = OTHER; note = guanosine
  modified_base 7: mod_base = OTHER; note = adenosine
  modified_base 8: mod_base = OTHER; note = adenosine
  modified_base 9: mod_base = um
  modified_base 10: mod_base = OTHER; note = adenosine
  modified_base 11: mod_base = um
  modified_base 12: mod_base = OTHER; note = adenosine
  modified_base 13: mod_base = OTHER; note = adenosine
  modified_base 14: mod_base = OTHER; note = adenosine
  modified_base 15: mod_base = cm
  modified_base 16: mod_base = um
  modified_base 17: mod_base = um
  modified_base 18: mod_base = OTHER; note = guanosine
  modified_base 19: mod_base = um
  modified_base 20: mod_base = OTHER; note = 2'-deoxythymidine
  modified_base 21: mod_base = OTHER; note = 2'-deoxythymidine
  source 1..21: mol_type = other RNA
tgactgaatataaacttgttt

SEQ ID NO: 1006 - RNA, 21 nt, synthetic construct
  modified_base 20..21: mod_base = OTHER; note = thymine
  modified_base 1: mod_base = OTHER; note = guanosine
  modified_base 2: mod_base = OTHER; note = adenosine
  modified_base 3: mod_base = cm
  modified_base 4: mod_base = um
  modified_base 5: mod_base = OTHER; note = guanosine
  modified_base 6: mod_base = OTHER; note = adenosine
  modified_base 7: mod_base = OTHER; note = adenosine
  modified_base 8: mod_base = um
  modified_base 9: mod_base = OTHER; note = adenosine
  modified_base 10: mod_base = um
  modified_base 11: mod_base = OTHER; note = adenosine
  modified_base 12: mod_base = OTHER; note = adenosine
  modified_base 13: mod_base = OTHER; note = adenosine
  modified_base 14: mod_base = cm
  modified_base 15: mod_base = um
  modified_base 16: mod_base = um
  modified_base 17: mod_base = OTHER; note = guanosine
  modified_base 18: mod_base = um
  modified_base 19: mod_base = OTHER; note = guanosine
  modified_base 20: mod_base = OTHER; note = 2'-deoxythymidine
  modified_base 21: mod_base = OTHER; note = 2'-deoxythymidine
  source 1..21: mol_type = other RNA
gactgaatataaacttgtgtt

SEQ ID NO: 1007 - RNA, 21 nt, synthetic construct
  modified_base 20..21: mod_base = OTHER; note = thymine
  modified_base 1: mod_base = OTHER; note = adenosine
  modified_base 2: mod_base = cm
  modified_base 3: mod_base = um
  modified_base 4: mod_base = OTHER; note = guanosine
  modified_base 5: mod_base = OTHER; note = adenosine
  modified_base 6: mod_base = OTHER; note = adenosine
  modified_base 7: mod_base = um
  modified_base 8: mod_base = OTHER; note = adenosine
  modified_base 9: mod_base = um
  modified_base 10: mod_base = OTHER; note = adenosine
  modified_base 11: mod_base = OTHER; note = adenosine
  modified_base 12: mod_base = OTHER; note = adenosine
  modified_base 13: mod_base = cm
  modified_base 14: mod_base = um
  modified_base 15: mod_base = um
  modified_base 16: mod_base = OTHER; note = guanosine
  modified_base 17: mod_base = um
  modified_base 18: mod_base = OTHER; note = guanosine
  modified_base 19: mod_base = OTHER; note = guanosine
  modified_base 20: mod_base = OTHER; note = 2'-deoxythymidine
  modified_base 21: mod_base = OTHER; note = 2'-deoxythymidine
  source 1..21: mol_type = other RNA
actgaatataaacttgtggtt

SEQ ID NO: 1008 - RNA, 21 nt, synthetic construct
  modified_base 20..21: mod_base = OTHER; note = thymine
  modified_base 1: mod_base = cm
  modified_base 2: mod_base = um
  modified_base 3: mod_base = OTHER; note = guanosine
  modified_base 4: mod_base = OTHER; note = adenosine
  modified_base 5: mod_base = OTHER; note = adenosine
  modified_base 6: mod_base = um
  modified_base 7: mod_base = OTHER; note = adenosine
  modified_base 8: mod_base = um
  modified_base 9: mod_base = OTHER; note = adenosine
  modified_base 10: mod_base = OTHER; note = adenosine
  modified_base 11: mod_base = OTHER; note = adenosine
  modified_base 12: mod_base = cm
  modified_base 13: mod_base = um
  modified_base 14: mod_base = um
  modified_base 15: mod_base = OTHER; note = guanosine
  modified_base 16: mod_base = um
  modified_base 17: mod_base = OTHER; note = guanosine
  modified_base 18: mod_base = OTHER; note = guanosine
  modified_base 19: mod_base = um
  modified_base 20: mod_base = OTHER; note = 2'-deoxythymidine
  modified_base 21: mod_base = OTHER; note = 2'-deoxythymidine
  source 1..21: mol_type = other RNA
ctgaatataaacttgtggttt

SEQ ID NO: 1009 - RNA, 21 nt, synthetic construct
  modified_base 20..21: mod_base = OTHER; note = thymine
  modified_base 1: mod_base = um
  modified_base 2: mod_base = OTHER; note = guanosine
  modified_base 3: mod_base = OTHER; note = adenosine
  modified_base 4: mod_base = OTHER; note = adenosine
  modified_base 5: mod_base = um
  modified_base 6: mod_base = OTHER; note = adenosine
  modified_base 7: mod_base = um
  modified_base 8: mod_base = OTHER; note = adenosine
  modified_base 9: mod_base = OTHER; note = adenosine
  modified_base 10: mod_base = OTHER; note = adenosine
  modified_base 11: mod_base = cm
  modified_base 12: mod_base = um
  modified_base 13: mod_base = um
  modified_base 14: mod_base = OTHER; note = guanosine
  modified_base 15: mod_base = um
  modified_base 16: mod_base = OTHER; note = guanosine
  modified_base 17: mod_base = OTHER; note = guanosine
  modified_base 18: mod_base = um
  modified_base 19: mod_base = OTHER; note = adenosine
  modified_base 20: mod_base = OTHER; note = 2'-deoxythymidine
  modified_base 21: mod_base = OTHER; note = 2'-deoxythymidine
  source 1..21: mol_type = other RNA
tgaatataaacttgtggtatt

SEQ ID NO: 1010 - RNA, 21 nt, synthetic construct
  modified_base 20..21: mod_base = OTHER; note = thymine
  modified_base 1: mod_base = OTHER; note = guanosine
  modified_base 2: mod_base = OTHER; note = adenosine
  modified_base 3: mod_base = OTHER; note = adenosine
  modified_base 4: mod_base = um
  modified_base 5: mod_base = OTHER; note = adenosine
  modified_base 6: mod_base = um
  modified_base 7: mod_base = OTHER; note = adenosine
  modified_base 8: mod_base = OTHER; note = adenosine
  modified_base 9: mod_base = OTHER; note = adenosine
  modified_base 10: mod_base = cm
  modified_base 11: mod_base = um
  modified_base 12: mod_base = um
  modified_base 13: mod_base = OTHER; note = guanosine
  modified_base 14: mod_base = um
  modified_base 15: mod_base = OTHER; note = guanosine
  modified_base 16: mod_base = OTHER; note = guanosine
  modified_base 17: mod_base = um
  modified_base 18: mod_base = OTHER; note = adenosine
  modified_base 19: mod_base = OTHER; note = guanosine
  modified_base 20: mod_base = OTHER; note = 2'-deoxythymidine
  modified_base 21: mod_base = OTHER; note = 2'-deoxythymidine
  source 1..21: mol_type = other RNA
gaatataaacttgtggtagtt

SEQ ID NO: 1011 - RNA, 21 nt, synthetic construct
  modified_base 20..21: mod_base = OTHER; note = thymine
  modified_base 1: mod_base = OTHER; note = adenosine
  modified_base 2: mod_base = OTHER; note = adenosine
  modified_base 3: mod_base = um
  modified_base 4: mod_base = OTHER; note = adenosine
  modified_base 5: mod_base = um
  modified_base 6: mod_base = OTHER; note = adenosine
  modified_base 7: mod_base = OTHER; note = adenosine
  modified_base 8: mod_base = OTHER; note = adenosine
  modified_base 9: mod_base = cm
  modified_base 10: mod_base = um
  modified_base 11: mod_base = um
  modified_base 12: mod_base = OTHER; note = guanosine
  modified_base 13: mod_base = um
  modified_base 14: mod_base = OTHER; note = guanosine
  modified_base 15: mod_base = OTHER; note = guanosine
  modified_base 16: mod_base = um
  modified_base 17: mod_base = OTHER; note = adenosine
  modified_base 18: mod_base = OTHER; note = guanosine
  modified_base 19: mod_base = um
  modified_base 20: mod_base = OTHER; note = 2'-deoxythymidine
  modified_base 21: mod_base = OTHER; note = 2'-deoxythymidine
  source 1..21: mol_type = other RNA
aatataaacttgtggtagttt

SEQ ID NO: 1012 - RNA, 21 nt, synthetic construct
  modified_base 20..21: mod_base = OTHER; note = thymine
  modified_base 1: mod_base = OTHER; note = adenosine
  modified_base 2: mod_base = um
  modified_base 3: mod_base = OTHER; note = adenosine
  modified_base 4: mod_base = um
  modified_base 5: mod_base = OTHER; note = adenosine
  modified_base 6: mod_base = OTHER; note = adenosine
  modified_base 7: mod_base = OTHER; note = adenosine
  modified_base 8: mod_base = cm
  modified_base 9: mod_base = um
  modified_base 10: mod_base = um
  modified_base 11: mod_base = OTHER; note = guanosine
  modified_base 12: mod_base = um
  modified_base 13: mod_base = OTHER; note = guanosine
  modified_base 14: mod_base = OTHER; note = guanosine
  modified_base 15: mod_base = um
  modified_base 16: mod_base = OTHER; note = adenosine
  modified_base 17: mod_base = OTHER; note = guanosine
  modified_base 18: mod_base = um
  modified_base 19: mod_base = um
  modified_base 20: mod_base = OTHER; note = 2'-deoxythymidine
  modified_base 21: mod_base = OTHER; note = 2'-deoxythymidine
  source 1..21: mol_type = other RNA
atataaacttgtggtagtttt

SEQ ID NO: 1013 - RNA, 21 nt, synthetic construct
  modified_base 20..21: mod_base = OTHER; note = thymine
  modified_base 1: mod_base = um
  modified_base 2: mod_base = OTHER; note = adenosine
  modified_base 3: mod_base = um
  modified_base 4: mod_base = OTHER; note = adenosine
  modified_base 5: mod_base = OTHER; note = adenosine
  modified_base 6: mod_base = OTHER; note = adenosine
  modified_base 7: mod_base = cm
  modified_base 8: mod_base = um
  modified_base 9: mod_base = um
  modified_base 10: mod_base = OTHER; note = guanosine
  modified_base 11: mod_base = um
  modified_base 12: mod_base = OTHER; note = guanosine
  modified_base 13: mod_base = OTHER; note = guanosine
  modified_base 14: mod_base = um
  modified_base 15: mod_base = OTHER; note = adenosine
  modified_base 16: mod_base = OTHER; note = guanosine
  modified_base 17: mod_base = um
  modified_base 18: mod_base = um
  modified_base 19: mod_base = OTHER; note = guanosine
  modified_base 20: mod_base = OTHER; note = 2'-deoxythymidine
  modified_base 21: mod_base = OTHER; note = 2'-deoxythymidine
  source 1..21: mol_type = other RNA
tataaacttgtggtagttgtt

SEQ ID NO: 1014 - RNA, 21 nt, synthetic construct
  modified_base 20..21: mod_base = OTHER; note = thymine
  modified_base 1: mod_base = OTHER; note = adenosine
  modified_base 2: mod_base = um
  modified_base 3: mod_base = OTHER; note = adenosine
  modified_base 4: mod_base = OTHER; note = adenosine
  modified_base 5: mod_base = OTHER; note = adenosine
  modified_base 6: mod_base = cm
  modified_base 7: mod_base = um
  modified_base 8: mod_base = um
  modified_base 9: mod_base = OTHER; note = guanosine
  modified_base 10: mod_base = um
  modified_base 11: mod_base = OTHER; note = guanosine
  modified_base 12: mod_base = OTHER; note = guanosine
  modified_base 13: mod_base = um
  modified_base 14: mod_base = OTHER; note = adenosine
  modified_base 15: mod_base = OTHER; note = guanosine
  modified_base 16: mod_base = um
  modified_base 17: mod_base = um
  modified_base 18: mod_base = OTHER; note = guanosine
  modified_base 19: mod_base = OTHER; note = guanosine
  modified_base 20: mod_base = OTHER; note = 2'-deoxythymidine
  modified_base 21: mod_base = OTHER; note = 2'-deoxythymidine
  source 1..21: mol_type = other RNA
ataaacttgtggtagttggtt

SEQ ID NO: 1015 - RNA, 21 nt, synthetic construct
  modified_base 20..21: mod_base = OTHER; note = thymine
  modified_base 1: mod_base = um
  modified_base 2: mod_base = OTHER; note = adenosine
  modified_base 3: mod_base = OTHER; note = adenosine
  modified_base 4: mod_base = OTHER; note = adenosine
  modified_base 5: mod_base = cm
  modified_base 6: mod_base = um
  modified_base 7: mod_base = um
  modified_base 8: mod_base = OTHER; note = guanosine
  modified_base 9: mod_base = um
  modified_base 10: mod_base = OTHER; note = guanosine
  modified_base 11: mod_base = OTHER; note = guanosine
  modified_base 12: mod_base = um
  modified_base 13: mod_base = OTHER; note = adenosine
  modified_base 14: mod_base = OTHER; note = guanosine
  modified_base 15: mod_base = um
  modified_base 16: mod_base = um
  modified_base 17: mod_base = OTHER; note = guanosine
  modified_base 18: mod_base = OTHER; note = guanosine
  modified_base 19: mod_base = OTHER; note = adenosine
  modified_base 20: mod_base = OTHER; note = 2'-deoxythymidine
  modified_base 21: mod_base = OTHER; note = 2'-deoxythymidine
  source 1..21: mol_type = other RNA
taaacttgtggtagttggatt

SEQ ID NO: 1016 - RNA, 21 nt, synthetic construct
  modified_base 20..21: mod_base = OTHER; note = thymine
  modified_base 1: mod_base = OTHER; note = adenosine
  modified_base 2: mod_base = OTHER; note = adenosine
  modified_base 3: mod_base = OTHER; note = adenosine
  modified_base 4: mod_base = cm
  modified_base 5: mod_base = um
  modified_base 6: mod_base = um
  modified_base 7: mod_base = OTHER; note = guanosine
  modified_base 8: mod_base = um
  modified_base 9: mod_base = OTHER; note = guanosine
  modified_base 10: mod_base = OTHER; note = guanosine
  modified_base 11: mod_base = um
  modified_base 12: mod_base = OTHER; note = adenosine
  modified_base 13: mod_base = OTHER; note = guanosine
  modified_base 14: mod_base = um
  modified_base 15: mod_base = um
  modified_base 16: mod_base = OTHER; note = guanosine
  modified_base 17: mod_base = OTHER; note = guanosine
  modified_base 18: mod_base = OTHER; note = adenosine
  modified_base 19: mod_base = OTHER; note = guanosine
  modified_base 20: mod_base = OTHER; note = 2'-deoxythymidine
  modified_base 21: mod_base = OTHER; note = 2'-deoxythymidine
  source 1..21: mol_type = other RNA
aaacttgtggtagttggagtt

SEQ ID NO: 1017 - RNA, 21 nt, synthetic construct
  modified_base 20..21: mod_base = OTHER; note = thymine
  modified_base 1: mod_base = OTHER; note = adenosine
  modified_base 2: mod_base = OTHER; note = adenosine
  modified_base 3: mod_base = cm
  modified_base 4: mod_base = um
  modified_base 5: mod_base = um
  modified_base 6: mod_base = OTHER; note = guanosine
  modified_base 7: mod_base = um
  modified_base 8: mod_base = OTHER; note = guanosine
  modified_base 9: mod_base = OTHER; note = guanosine
  modified_base 10: mod_base = um
  modified_base 11: mod_base = OTHER; note = adenosine
  modified_base 12: mod_base = OTHER; note = guanosine
  modified_base 13: mod_base = um
  modified_base 14: mod_base = um
  modified_base 15: mod_base = OTHER; note = guanosine
  modified_base 16: mod_base = OTHER; note = guanosine
  modified_base 17: mod_base = OTHER; note = adenosine
  modified_base 18: mod_base = OTHER; note = guanosine
  modified_base 19: mod_base = cm
  modified_base 20: mod_base = OTHER; note = 2'-deoxythymidine
  modified_base 21: mod_base = OTHER; note = 2'-deoxythymidine
  source 1..21: mol_type = other RNA
aacttgtggtagttggagctt

SEQ ID NO: 1018 - RNA, 21 nt, synthetic construct
  modified_base 20..21: mod_base = OTHER; note = thymine
  modified_base 1: mod_base = OTHER; note = adenosine
  modified_base 2: mod_base = cm
  modified_base 3: mod_base = um
  modified_base 4: mod_base = um
  modified_base 5: mod_base = OTHER; note = guanosine
  modified_base 6: mod_base = um
  modified_base 7: mod_base = OTHER; note = guanosine
  modified_base 8: mod_base = OTHER; note = guanosine
  modified_base 9: mod_base = um
  modified_base 10: mod_base = OTHER; note = adenosine
  modified_base 11: mod_base = OTHER; note = guanosine
  modified_base 12: mod_base = um
  modified_base 13: mod_base = um
  modified_base 14: mod_base = OTHER; note = guanosine
  modified_base 15: mod_base = OTHER; note = guanosine
  modified_base 16: mod_base = OTHER; note = adenosine
  modified_base 17: mod_base = OTHER; note = guanosine
  modified_base 18: mod_base = cm
  modified_base 19: mod_base = um
  modified_base 20: mod_base = OTHER; note = 2'-deoxythymidine
  modified_base 21: mod_base = OTHER; note = 2'-deoxythymidine
  source 1..21: mol_type = other RNA
acttgtggtagttggagcttt

SEQ ID NO: 1019 - RNA, 21 nt, synthetic construct
  modified_base 20..21: mod_base = OTHER; note = thymine
  modified_base 1: mod_base = cm
  modified_base 2: mod_base = um
  modified_base 3: mod_base = um
  modified_base 4: mod_base = OTHER; note = guanosine
  modified_base 5: mod_base = um
  modified_base 6: mod_base = OTHER; note = guanosine
  modified_base 7: mod_base = OTHER; note = guanosine
  modified_base 8: mod_base = um
  modified_base 9: mod_base = OTHER; note = adenosine
  modified_base 10: mod_base = OTHER; note = guanosine
  modified_base 11: mod_base = um
  modified_base 12: mod_base = um
  modified_base 13: mod_base = OTHER; note = guanosine
  modified_base 14: mod_base = OTHER; note = guanosine
  modified_base 15: mod_base = OTHER; note = adenosine
  modified_base 16: mod_base = OTHER; note = guanosine
  modified_base 17: mod_base = cm
  modified_base 18: mod_base = um
  modified_base 19: mod_base = OTHER; note = guanosine
  modified_base 20: mod_base = OTHER; note = 2'-deoxythymidine
  modified_base 21: mod_base = OTHER; note = 2'-deoxythymidine
  source 1..21: mol_type = other RNA
cttgtggtagttggagctgtt

SEQ ID NO: 1020 - RNA, 21 nt, synthetic construct
  modified_base 20..21: mod_base = OTHER; note = thymine
  modified_base 1: mod_base = um
  modified_base 2: mod_base = um
  modified_base 3: mod_base = OTHER; note = guanosine
  modified_base 4: mod_base = um
  modified_base 5: mod_base = OTHER; note = guanosine
  modified_base 6: mod_base = OTHER; note = guanosine
  modified_base 7: mod_base = um
  modified_base 8: mod_base = OTHER; note = adenosine
  modified_base 9: mod_base = OTHER; note = guanosine
  modified_base 10: mod_base = um
  modified_base 11: mod_base = um
  modified_base 12: mod_base = OTHER; note = guanosine
  modified_base 13: mod_base = OTHER; note = guanosine
  modified_base 14: mod_base = OTHER; note = adenosine
  modified_base 15: mod_base = OTHER; note = guanosine
  modified_base 16: mod_base = cm
  modified_base 17: mod_base = um
  modified_base 18: mod_base = OTHER; note = guanosine
  modified_base 19: mod_base = OTHER; note = guanosine
  modified_base 20: mod_base = OTHER; note = 2'-deoxythymidine
  modified_base 21: mod_base = OTHER; note = 2'-deoxythymidine
  source 1..21: mol_type = other RNA
ttgtggtagttggagctggtt

SEQ ID NO: 1021 - RNA, 21 nt, synthetic construct
  modified_base 20..21: mod_base = OTHER; note = thymine
  modified_base 1: mod_base = um
  modified_base 2: mod_base = OTHER; note = guanosine
  modified_base 3: mod_base = um
  modified_base 4: mod_base = OTHER; note = guanosine
  modified_base 5: mod_base = OTHER; note = guanosine
  modified_base 6: mod_base = um
  modified_base 7: mod_base = OTHER; note = adenosine
  modified_base 8: mod_base = OTHER; note = guanosine
  modified_base 9: mod_base = um
  modified_base 10: mod_base = um
  modified_base 11: mod_base = OTHER; note = guanosine
  modified_base 12: mod_base = OTHER; note = guanosine
  modified_base 13: mod_base = OTHER; note = adenosine
  modified_base 14: mod_base = OTHER; note = guanosine
  modified_base 15: mod_base = cm
  modified_base 16: mod_base = um
  modified_base 17: mod_base = OTHER; note = guanosine
  modified_base 18: mod_base = OTHER; note = guanosine
  modified_base 19: mod_base = um
  modified_base 20: mod_base = OTHER; note = 2'-deoxythymidine
  modified_base 21: mod_base = OTHER; note = 2'-deoxythymidine
  source 1..21: mol_type = other RNA
tgtggtagttggagctggttt

SEQ ID NO: 1022 - RNA, 21 nt, synthetic construct
  modified_base 20..21: mod_base = OTHER; note = thymine
  modified_base 1: mod_base = OTHER; note = guanosine
  modified_base 2: mod_base = um
  modified_base 3: mod_base = OTHER; note = guanosine
  modified_base 4: mod_base = OTHER; note = guanosine
  modified_base 5: mod_base = um
  modified_base 6: mod_base = OTHER; note = adenosine
  modified_base 7: mod_base = OTHER; note = guanosine
  modified_base 8: mod_base = um
  modified_base 9: mod_base = um
  modified_base 10: mod_base = OTHER; note = guanosine
  modified_base 11: mod_base = OTHER; note = guanosine
  modified_base 12: mod_base = OTHER; note = adenosine
  modified_base 13: mod_base = OTHER; note = guanosine
  modified_base 14: mod_base = cm
  modified_base 15: mod_base = um
  modified_base 16: mod_base = OTHER; note = guanosine
  modified_base 17: mod_base = OTHER; note = guanosine
  modified_base 18: mod_base = um
  modified_base 19: mod_base = OTHER; note = guanosine
  modified_base 20: mod_base = OTHER; note = 2'-deoxythymidine
  modified_base 21: mod_base = OTHER; note = 2'-deoxythymidine
  source 1..21: mol_type = other RNA
gtggtagttggagctggtgtt

SEQ ID NO: 1023 - RNA, 21 nt, synthetic construct
  modified_base 20..21: mod_base = OTHER; note = thymine
  modified_base 1: mod_base = um
  modified_base 2: mod_base = OTHER; note = guanosine
  modified_base 3: mod_base = OTHER; note = guanosine
  modified_base 4: mod_base = um
  modified_base 5: mod_base = OTHER; note = adenosine
  modified_base 6: mod_base = OTHER; note = guanosine
  modified_base 7: mod_base = um
  modified_base 8: mod_base = um
  modified_base 9: mod_base = OTHER; note = guanosine
  modified_base 10: mod_base = OTHER; note = guanosine
  modified_base 11: mod_base = OTHER; note = adenosine
  modified_base 12: mod_base = OTHER; note = guanosine
  modified_base 13: mod_base = cm
  modified_base 14: mod_base = um
  modified_base 15: mod_base = OTHER; note = guanosine
  modified_base 16: mod_base = OTHER; note = guanosine
  modified_base 17: mod_base = um
  modified_base 18: mod_base = OTHER; note = guanosine
  modified_base 19: mod_base = OTHER; note = guanosine
  modified_base 20: mod_base = OTHER; note = 2'-deoxythymidine
  modified_base 21: mod_base = OTHER; note = 2'-deoxythymidine
  source 1..21: mol_type = other RNA
tggtagttggagctggtggtt

SEQ ID NO: 1024 - RNA, 21 nt, synthetic construct
  modified_base 20..21: mod_base = OTHER; note = thymine
  modified_base 1: mod_base = OTHER; note = guanosine
  modified_base 2: mod_base = OTHER; note = guanosine
  modified_base 3: mod_base = um
  modified_base 4: mod_base = OTHER; note = adenosine
  modified_base 5: mod_base = OTHER; note = guanosine
  modified_base 6: mod_base = um
  modified_base 7: mod_base = um
  modified_base 8: mod_base = OTHER; note = guanosine
  modified_base 9: mod_base = OTHER; note = guanosine
  modified_base 10: mod_base = OTHER; note = adenosine
  modified_base 11: mod_base = OTHER; note = guanosine
  modified_base 12: mod_base = cm
  modified_base 13: mod_base = um
  modified_base 14: mod_base = OTHER; note = guanosine
  modified_base 15: mod_base = OTHER; note = guanosine
  modified_base 16: mod_base = um
  modified_base 17: mod_base = OTHER; note = guanosine
  modified_base 18: mod_base = OTHER; note = guanosine
  modified_base 19: mod_base = cm
  modified_base 20: mod_base = OTHER; note = 2'-deoxythymidine
  modified_base 21: mod_base = OTHER; note = 2'-deoxythymidine
  source 1..21: mol_type = other RNA
ggtagttggagctggtggctt

SEQ ID NO: 1025 - RNA, 21 nt, synthetic construct
  modified_base 20..21: mod_base = OTHER; note = thymine
  modified_base 1: mod_base = OTHER; note = guanosine
  modified_base 2: mod_base = um
  modified_base 3: mod_base = OTHER; note = adenosine
  modified_base 4: mod_base = OTHER; note = guanosine
  modified_base 5: mod_base = um
  modified_base 6: mod_base = um
  modified_base 7: mod_base = OTHER; note = guanosine
  modified_base 8: mod_base = OTHER; note = guanosine
  modified_base 9: mod_base = OTHER; note = adenosine
  modified_base 10: mod_base = OTHER; note = guanosine
  modified_base 11: mod_base = cm
  modified_base 12: mod_base = um
  modified_base 13: mod_base = OTHER; note = guanosine
  modified_base 14: mod_base = OTHER; note = guanosine
  modified_base 15: mod_base = um
  modified_base 16: mod_base = OTHER; note = guanosine
  modified_base 17: mod_base = OTHER; note = guanosine
  modified_base 18: mod_base = cm
  modified_base 19: mod_base = OTHER; note = guanosine
  modified_base 20: mod_base = OTHER; note = 2'-deoxythymidine
  modified_base 21: mod_base = OTHER; note = 2'-deoxythymidine
  source 1..21: mol_type = other RNA
gtagttggagctggtggcgtt

SEQ ID NO: 1026 - RNA, 21 nt, synthetic construct
  modified_base 20..21: mod_base = OTHER; note = thymine
  modified_base 1: mod_base = um
  modified_base 2: mod_base = OTHER; note = adenosine
  modified_base 3: mod_base = OTHER; note = guanosine
  modified_base 4: mod_base = um
  modified_base 5: mod_base = um
  modified_base 6: mod_base = OTHER; note = guanosine
  modified_base 7: mod_base = OTHER; note = guanosine
  modified_base 8: mod_base = OTHER; note = adenosine
  modified_base 9: mod_base = OTHER; note = guanosine
  modified_base 10: mod_base = cm
  modified_base 11: mod_base = um
  modified_base 12: mod_base = OTHER; note = guanosine
  modified_base 13: mod_base = OTHER; note = guanosine
  modified_base 14: mod_base = um
  modified_base 15: mod_base = OTHER; note = guanosine
  modified_base 16: mod_base = OTHER; note = guanosine
  modified_base 17: mod_base = cm
  modified_base 18: mod_base = OTHER; note = guanosine
  modified_base 19: mod_base = um
  modified_base 20: mod_base = OTHER; note = 2'-deoxythymidine
  modified_base 21: mod_base = OTHER; note = 2'-deoxythymidine
  source 1..21: mol_type = other RNA
tagttggagctggtggcgttt

SEQ ID NO: 1027 - RNA, 21 nt, synthetic construct
  modified_base 20..21: mod_base = OTHER; note = thymine
  modified_base 1: mod_base = OTHER; note = adenosine
  modified_base 2: mod_base = OTHER; note = guanosine
  modified_base 3: mod_base = um
  modified_base 4: mod_base = um
  modified_base 5: mod_base = OTHER; note = guanosine
  modified_base 6: mod_base = OTHER; note = guanosine
  modified_base 7: mod_base = OTHER; note = adenosine
  modified_base 8: mod_base = OTHER; note = guanosine
  modified_base 9: mod_base = cm
  modified_base 10: mod_base = um
  modified_base 11: mod_base = OTHER; note = guanosine
  modified_base 12: mod_base = OTHER; note = guanosine
  modified_base 13: mod_base = um
  modified_base 14: mod_base = OTHER; note = guanosine
  modified_base 15: mod_base = OTHER; note = guanosine
  modified_base 16: mod_base = cm
  modified_base 17: mod_base = OTHER; note = guanosine
  modified_base 18: mod_base = um
  modified_base 19: mod_base = OTHER; note = adenosine
  modified_base 20: mod_base = OTHER; note = 2'-deoxythymidine
  modified_base 21: mod_base = OTHER; note = 2'-deoxythymidine
  source 1..21: mol_type = other RNA
agttggagctggtggcgtatt

SEQ ID NO: 1028 - RNA, 21 nt, synthetic construct
  modified_base 20..21: mod_base = OTHER; note = thymine
  modified_base 1: mod_base = OTHER; note = guanosine
  modified_base 2: mod_base = um
  modified_base 3: mod_base = um
  modified_base 4: mod_base = OTHER; note = guanosine
  modified_base 5: mod_base = OTHER; note = guanosine
  modified_base 6: mod_base = OTHER; note = adenosine
  modified_base 7: mod_base = OTHER; note = guanosine
  modified_base 8: mod_base = cm
  modified_base 9: mod_base = um
  modified_base 10: mod_base = OTHER; note = guanosine
  modified_base 11: mod_base = OTHER; note = guanosine
  modified_base 12: mod_base = um
  modified_base 13: mod_base = OTHER; note = guanosine
  modified_base 14: mod_base = OTHER; note = guanosine
  modified_base 15: mod_base = cm
  modified_base 16: mod_base = OTHER; note = guanosine
  modified_base 17: mod_base = um
  modified_base 18: mod_base = OTHER; note = adenosine
  modified_base 19: mod_base = OTHER; note = guanosine
  modified_base 20: mod_base = OTHER; note = 2'-deoxythymidine
  modified_base 21: mod_base = OTHER; note = 2'-deoxythymidine
  source 1..21: mol_type = other RNA
gttggagctggtggcgtagtt

SEQ ID NO: 1029 - RNA, 21 nt, synthetic construct
  modified_base 20..21: mod_base = OTHER; note = thymine
  modified_base 1: mod_base = um
  modified_base 2: mod_base = um
  modified_base 3: mod_base = OTHER; note = guanosine
  modified_base 4: mod_base = OTHER; note = guanosine
  modified_base 5: mod_base = OTHER; note = adenosine
  modified_base 6: mod_base = OTHER; note = guanosine
  modified_base 7: mod_base = cm
  modified_base 8: mod_base = um
  modified_base 9: mod_base = OTHER; note = guanosine
  modified_base 10: mod_base = OTHER; note = guanosine
  modified_base 11: mod_base = um
  modified_base 12: mod_base = OTHER; note = guanosine
  modified_base 13: mod_base = OTHER; note = guanosine
  modified_base 14: mod_base = cm
  modified_base 15: mod_base = OTHER; note = guanosine
  modified_base 16: mod_base = um
  modified_base 17: mod_base = OTHER; note = adenosine
  modified_base 18: mod_base = OTHER; note = guanosine
  modified_base 19: mod_base = OTHER; note = guanosine
  modified_base 20: mod_base = OTHER; note = 2'-deoxythymidine
  modified_base 21: mod_base = OTHER; note = 2'-deoxythymidine
  source 1..21: mol_type = other RNA
ttggagctggtggcgtaggtt

SEQ ID NO: 1030 - RNA, 21 nt, synthetic construct
  modified_base 20..21: mod_base = OTHER; note = thymine
  modified_base 1: mod_base = um
  modified_base 2: mod_base = OTHER; note = guanosine
  modified_base 3: mod_base = OTHER; note = guanosine
  modified_base 4: mod_base = OTHER; note = adenosine
  modified_base 5: mod_base = OTHER; note = guanosine
  modified_base 6: mod_base = cm
  modified_base 7: mod_base = um
  modified_base 8: mod_base = OTHER; note = guanosine
  modified_base 9: mod_base = OTHER; note = guanosine
  modified_base 10: mod_base = um
  modified_base 11: mod_base = OTHER; note = guanosine
  modified_base 12: mod_base = OTHER; note = guanosine
  modified_base 13: mod_base = cm
  modified_base 14: mod_base = OTHER; note = guanosine
  modified_base 15: mod_base = um
  modified_base 16: mod_base = OTHER; note = adenosine
  modified_base 17: mod_base = OTHER; note = guanosine
  modified_base 18: mod_base = OTHER; note = guanosine
  modified_base 19: mod_base = cm
  modified_base 20: mod_base = OTHER; note = 2'-deoxythymidine
  modified_base 21: mod_base = OTHER; note = 2'-deoxythymidine
  source 1..21: mol_type = other RNA
tggagctggtggcgtaggctt

SEQ ID NO: 1031 - RNA, 21 nt, synthetic construct
  modified_base 20..21: mod_base = OTHER; note = thymine
  modified_base 1: mod_base = OTHER; note = guanosine
  modified_base 2: mod_base = OTHER; note = guanosine
  modified_base 3: mod_base = OTHER; note = adenosine
  modified_base 4: mod_base = OTHER; note = guanosine
  modified_base 5: mod_base = cm
  modified_base 6: mod_base = um
  modified_base 7: mod_base = OTHER; note = guanosine
  modified_base 8: mod_base = OTHER; note = guanosine
  modified_base 9: mod_base = um
  modified_base 10: mod_base = OTHER; note = guanosine
  modified_base 11: mod_base = OTHER; note = guanosine
  modified_base 12: mod_base = cm
  modified_base 13: mod_base = OTHER; note = guanosine
  modified_base 14: mod_base = um
  modified_base 15: mod_base = OTHER; note = adenosine
  modified_base 16: mod_base = OTHER; note = guanosine
  modified_base 17: mod_base = OTHER; note = guanosine
  modified_base 18: mod_base = cm
  modified_base 19: mod_base = OTHER; note = adenosine
  modified_base 20: mod_base = OTHER; note = 2'-deoxythymidine
  modified_base 21: mod_base = OTHER; note = 2'-deoxythymidine
  source 1..21: mol_type = other RNA
ggagctggtggcgtaggcatt

SEQ ID NO: 1032 - RNA, 21 nt, synthetic construct
  modified_base 20..21: mod_base = OTHER; note = thymine
  modified_base 1: mod_base = OTHER; note = guanosine
  modified_base 2: mod_base = OTHER; note = adenosine
  modified_base 3: mod_base = OTHER; note = guanosine
  modified_base 4: mod_base = cm
  modified_base 5: mod_base = um
  modified_base 6: mod_base = OTHER; note = guanosine
  modified_base 7: mod_base = OTHER; note = guanosine
  modified_base 8: mod_base = um
  modified_base 9: mod_base = OTHER; note = guanosine
  modified_base 10: mod_base = OTHER; note = guanosine
  modified_base 11: mod_base = cm
  modified_base 12: mod_base = OTHER; note = guanosine
  modified_base 13: mod_base = um
  modified_base 14: mod_base = OTHER; note = adenosine
  modified_base 15: mod_base = OTHER; note = guanosine
  modified_base 16: mod_base = OTHER; note = guanosine
  modified_base 17: mod_base = cm
  modified_base 18: mod_base = OTHER; note = adenosine
  modified_base 19: mod_base = OTHER; note = adenosine
  modified_base 20: mod_base = OTHER; note = 2'-deoxythymidine
  modified_base 21: mod_base = OTHER; note = 2'-deoxythymidine
  source 1..21: mol_type = other RNA
gagctggtggcgtaggcaatt

SEQ ID NO: 1033 - RNA, 21 nt, synthetic construct
  modified_base 20..21: mod_base = OTHER; note = thymine
  modified_base 1: mod_base = OTHER; note = adenosine
  modified_base 2: mod_base = OTHER; note = guanosine
  modified_base 3: mod_base = cm
  modified_base 4: mod_base = um
  modified_base 5: mod_base = OTHER; note = guanosine
  modified_base 6: mod_base = OTHER; note = guanosine
  modified_base 7: mod_base = um
  modified_base 8: mod_base = OTHER; note = guanosine
  modified_base 9: mod_base = OTHER; note = guanosine
  modified_base 10: mod_base = cm
  modified_base 11: mod_base = OTHER; note = guanosine
  modified_base 12: mod_base = um
  modified_base 13: mod_base = OTHER; note = adenosine
  modified_base 14: mod_base = OTHER; note = guanosine
  modified_base 15: mod_base = OTHER; note = guanosine
  modified_base 16: mod_base = cm
  modified_base 17: mod_base = OTHER; note = adenosine
  modified_base 18: mod_base = OTHER; note = adenosine
  modified_base 19: mod_base = OTHER; note = guanosine
  modified_base 20: mod_base = OTHER; note = 2'-deoxythymidine
  modified_base 21: mod_base = OTHER; note = 2'-deoxythymidine
  source 1..21: mol_type = other RNA
agctggtggcgtaggcaagtt

SEQ ID NO: 1034 - RNA, 21 nt, synthetic construct
  modified_base 20..21: mod_base = OTHER; note = thymine
  modified_base 1: mod_base = OTHER; note = guanosine
  modified_base 2: mod_base = cm
  modified_base 3: mod_base = um
  modified_base 4: mod_base = OTHER; note = guanosine
  modified_base 5: mod_base = OTHER; note = guanosine
  modified_base 6: mod_base = um
  modified_base 7: mod_base = OTHER; note = guanosine
  modified_base 8: mod_base = OTHER; note = guanosine
  modified_base 9: mod_base = cm
  modified_base 10: mod_base = OTHER; note = guanosine
  modified_base 11: mod_base = um
  modified_base 12: mod_base = OTHER; note = adenosine
  modified_base 13: mod_base = OTHER; note = guanosine
  modified_base 14: mod_base = OTHER; note = guanosine
  modified_base 15: mod_base = cm
  modified_base 16: mod_base = OTHER; note = adenosine
  modified_base 17: mod_base = OTHER; note = adenosine
  modified_base 18: mod_base = OTHER; note = guanosine
  modified_base 19: mod_base = OTHER; note = adenosine
  modified_base 20: mod_base = OTHER; note = 2'-deoxythymidine
  modified_base 21: mod_base = OTHER; note = 2'-deoxythymidine
  source 1..21: mol_type = other RNA
gctggtggcgtaggcaagatt

SEQ ID NO: 1035 - RNA, 21 nt, synthetic construct
  modified_base 20..21: mod_base = OTHER; note = thymine
  modified_base 1: mod_base = cm
  modified_base 2: mod_base = um
  modified_base 3: mod_base = OTHER; note = guanosine
  modified_base 4: mod_base = OTHER; note = guanosine
  modified_base 5: mod_base = um
  modified_base 6: mod_base = OTHER; note = guanosine
  modified_base 7: mod_base = OTHER; note = guanosine
  modified_base 8: mod_base = cm
  modified_base 9: mod_base = OTHER; note = guanosine
  modified_base 10: mod_base = um
  modified_base 11: mod_base = OTHER; note = adenosine
  modified_base 12: mod_base = OTHER; note = guanosine
  modified_base 13: mod_base = OTHER; note = guanosine
  modified_base 14: mod_base = cm
  modified_base 15: mod_base = OTHER; note = adenosine
  modified_base 16: mod_base = OTHER; note = adenosine
  modified_base 17: mod_base = OTHER; note = guanosine
  modified_base 18: mod_base = OTHER; note = adenosine
  modified_base 19: mod_base = OTHER; note = guanosine
  modified_base 20: mod_base = OTHER; note = 2'-deoxythymidine
  modified_base 21: mod_base = OTHER; note = 2'-deoxythymidine
  source 1..21: mol_type = other RNA
ctggtggcgtaggcaagagtt

SEQ ID NO: 1036 - RNA, 21 nt, synthetic construct
  modified_base 20..21: mod_base = OTHER; note = thymine
  modified_base 1: mod_base = um
  modified_base 2: mod_base = OTHER; note = guanosine
  modified_base 3: mod_base = OTHER; note = guanosine
  modified_base 4: mod_base = um
  modified_base 5: mod_base = OTHER; note = guanosine
  modified_base 6: mod_base = OTHER; note = guanosine
  modified_base 7: mod_base = cm
  modified_base 8: mod_base = OTHER; note = guanosine
  modified_base 9: mod_base = um
  modified_base 10: mod_base = OTHER; note = adenosine
  modified_base 11: mod_base = OTHER; note = guanosine
  modified_base 12: mod_base = OTHER; note = guanosine
  modified_base 13: mod_base = cm
  modified_base 14: mod_base = OTHER; note = adenosine
  modified_base 15: mod_base = OTHER; note = adenosine
  modified_base 16: mod_base = OTHER; note = guanosine
  modified_base 17: mod_base = OTHER; note = adenosine
  modified_base 18: mod_base = OTHER; note = guanosine
  modified_base 19: mod_base = um
  modified_base 20: mod_base = OTHER; note = 2'-deoxythymidine
  modified_base 21: mod_base = OTHER; note = 2'-deoxythymidine
  source 1..21: mol_type = other RNA
tggtggcgtaggcaagagttt

SEQ ID NO: 1037 - RNA, 21 nt, synthetic construct
  modified_base 20..21: mod_base = OTHER; note = thymine
  modified_base 1: mod_base = OTHER; note = guanosine
  modified_base 2: mod_base = OTHER; note = guanosine
  modified_base 3: mod_base = um
  modified_base 4: mod_base = OTHER; note = guanosine
  modified_base 5: mod_base = OTHER; note = guanosine
  modified_base 6: mod_base = cm
  modified_base 7: mod_base = OTHER; note = guanosine
  modified_base 8: mod_base = um
  modified_base 9: mod_base = OTHER; note = adenosine
  modified_base 10: mod_base = OTHER; note = guanosine
  modified_base 11: mod_base = OTHER; note = guanosine
  modified_base 12: mod_base = cm
  modified_base 13: mod_base = OTHER; note = adenosine
  modified_base 14: mod_base = OTHER; note = adenosine
  modified_base 15: mod_base = OTHER; note = guanosine
  modified_base 16: mod_base = OTHER; note = adenosine
  modified_base 17: mod_base = OTHER; note = guanosine
  modified_base 18: mod_base = um
  modified_base 19: mod_base = OTHER; note = guanosine
  modified_base 20: mod_base = OTHER; note = 2'-deoxythymidine
  modified_base 21: mod_base = OTHER; note = 2'-deoxythymidine
  source 1..21: mol_type = other RNA
ggtggcgtaggcaagagtgtt

SEQ ID NO: 1038 - RNA, 21 nt, synthetic construct
  modified_base 20..21: mod_base = OTHER; note = thymine
  modified_base 1: mod_base = OTHER; note = guanosine
  modified_base 2: mod_base = um
  modified_base 3: mod_base = OTHER; note = guanosine
  modified_base 4: mod_base = OTHER; note = guanosine
  modified_base 5: mod_base = cm
  modified_base 6: mod_base = OTHER; note = guanosine
  modified_base 7: mod_base = um
  modified_base 8: mod_base = OTHER; note = adenosine
  modified_base 9: mod_base = OTHER; note = guanosine
  modified_base 10: mod_base = OTHER; note = guanosine
  modified_base 11: mod_base = cm
  modified_base 12: mod_base = OTHER; note = adenosine
  modified_base 13: mod_base = OTHER; note = adenosine
  modified_base 14: mod_base = OTHER; note = guanosine
  modified_base 15: mod_base = OTHER; note = adenosine
  modified_base 16: mod_base = OTHER; note = guanosine
  modified_base 17: mod_base = um
  modified_base 18: mod_base = OTHER; note = guanosine
  modified_base 19: mod_base = cm
  modified_base 20: mod_base = OTHER; note = 2'-deoxythymidine
  modified_base 21: mod_base = OTHER; note = 2'-deoxythymidine
  source 1..21: mol_type = other RNA
gtggcgtaggcaagagtgctt

SEQ ID NO: 1039 - RNA, 21 nt, synthetic construct
  modified_base 20..21: mod_base = OTHER; note = thymine
  modified_base 1: mod_base = um
  modified_base 2: mod_base = OTHER; note = guanosine
  modified_base 3: mod_base = OTHER; note = guanosine
  modified_base 4: mod_base = cm
  modified_base 5: mod_base = OTHER; note = guanosine
  modified_base 6: mod_base = um
  modified_base 7: mod_base = OTHER; note = adenosine
  modified_base 8: mod_base = OTHER; note = guanosine
  modified_base 9: mod_base = OTHER; note = guanosine
  modified_base 10: mod_base = cm
  modified_base 11: mod_base = OTHER; note = adenosine
  modified_base 12: mod_base = OTHER; note = adenosine
  modified_base 13: mod_base = OTHER; note = guanosine
  modified_base 14: mod_base = OTHER; note = adenosine
  modified_base 15: mod_base = OTHER; note = guanosine
  modified_base 16: mod_base = um
  modified_base 17: mod_base = OTHER; note = guanosine
  modified_base 18: mod_base = cm
  modified_base 19: mod_base = cm
  modified_base 20: mod_base = OTHER; note = 2'-deoxythymidine
  modified_base 21: mod_base = OTHER; note = 2'-deoxythymidine
  source 1..21: mol_type = other RNA
tggcgtaggcaagagtgcctt

SEQ ID NO: 1040 - RNA, 21 nt, synthetic construct
  modified_base 20..21: mod_base = OTHER; note = thymine
  modified_base 1: mod_base = OTHER; note = guanosine
  modified_base 2: mod_base = OTHER; note = guanosine
  modified_base 3: mod_base = cm
  modified_base 4: mod_base = OTHER; note = guanosine
  modified_base 5: mod_base = um
  modified_base 6: mod_base = OTHER; note = adenosine
  modified_base 7: mod_base = OTHER; note = guanosine
  modified_base 8: mod_base = OTHER; note = guanosine
  modified_base 9: mod_base = cm
  modified_base 10: mod_base = OTHER; note = adenosine
  modified_base 11: mod_base = OTHER; note = adenosine
  modified_base 12: mod_base = OTHER; note = guanosine
  modified_base 13: mod_base = OTHER; note = adenosine
  modified_base 14: mod_base = OTHER; note = guanosine
  modified_base 15: mod_base = um
  modified_base 16: mod_base = OTHER; note = guanosine
  modified_base 17: mod_base = cm
  modified_base 18: mod_base = cm
  modified_base 19: mod_base = um
  modified_base 20: mod_base = OTHER; note = 2'-deoxythymidine
  modified_base 21: mod_base = OTHER; note = 2'-deoxythymidine
  source 1..21: mol_type = other RNA
ggcgtaggcaagagtgccttt

SEQ ID NO: 1041 - RNA, 21 nt, synthetic construct
  modified_base 20..21: mod_base = OTHER; note = thymine
  modified_base 1: mod_base = OTHER; note = guanosine
  modified_base 2: mod_base = cm
  modified_base 3: mod_base = OTHER; note = guanosine
  modified_base 4: mod_base = um
  modified_base 5: mod_base = OTHER; note = adenosine
  modified_base 6: mod_base = OTHER; note = guanosine
  modified_base 7: mod_base = OTHER; note = guanosine
  modified_base 8: mod_base = cm
  modified_base 9: mod_base = OTHER; note = adenosine
  modified_base 10: mod_base = OTHER; note = adenosine
  modified_base 11: mod_base = OTHER; note = guanosine
  modified_base 12: mod_base = OTHER; note = adenosine
  modified_base 13: mod_base = OTHER; note = guanosine
  modified_base 14: mod_base = um
  modified_base 15: mod_base = OTHER; note = guanosine
  modified_base 16: mod_base = cm
  modified_base 17: mod_base = cm
  modified_base 18: mod_base = um
  modified_base 19: mod_base = um
  modified_base 20: mod_base = OTHER; note = 2'-deoxythymidine
  modified_base 21: mod_base = OTHER; note = 2'-deoxythymidine
  source 1..21: mol_type = other RNA
gcgtaggcaagagtgcctttt

SEQ ID NO: 1042 - RNA, 21 nt, synthetic construct
  modified_base 20..21: mod_base = OTHER; note = thymine
  modified_base 1: mod_base = cm
  modified_base 2: mod_base = OTHER; note = guanosine
  modified_base 3: mod_base = um
  modified_base 4: mod_base = OTHER; note = adenosine
  modified_base 5: mod_base = OTHER; note = guanosine
  modified_base 6: mod_base = OTHER; note = guanosine
  modified_base 7: mod_base = cm
  modified_base 8: mod_base = OTHER; note = adenosine
  modified_base 9: mod_base = OTHER; note = adenosine
  modified_base 10: mod_base = OTHER; note = guanosine
  modified_base 11: mod_base = OTHER; note = adenosine
  modified_base 12: mod_base = OTHER; note = guanosine
  modified_base 13: mod_base = um
  modified_base 14: mod_base = OTHER; note = guanosine
  modified_base 15: mod_base = cm
  modified_base 16: mod_base = cm
  modified_base 17: mod_base = um
  modified_base 18: mod_base = um
  modified_base 19: mod_base = OTHER; note = guanosine
  modified_base 20: mod_base = OTHER; note = 2'-deoxythymidine
  modified_base 21: mod_base = OTHER; note = 2'-deoxythymidine
  source 1..21: mol_type = other RNA
cgtaggcaagagtgccttgtt

SEQ ID NO: 1043 - RNA, 21 nt, synthetic construct
  modified_base 20..21: mod_base = OTHER; note = thymine
  modified_base 1: mod_base = OTHER; note = guanosine
  modified_base 2: mod_base = um
  modified_base 3: mod_base = OTHER; note = adenosine
  modified_base 4: mod_base = OTHER; note = guanosine
  modified_base 5: mod_base = OTHER; note = guanosine
  modified_base 6: mod_base = cm
  modified_base 7: mod_base = OTHER; note = adenosine
  modified_base 8: mod_base = OTHER; note = adenosine
  modified_base 9: mod_base = OTHER; note = guanosine
  modified_base 10: mod_base = OTHER; note = adenosine
  modified_base 11: mod_base = OTHER; note = guanosine
  modified_base 12: mod_base = um
  modified_base 13: mod_base = OTHER; note = guanosine
  modified_base 14: mod_base = cm
  modified_base 15: mod_base = cm
  modified_base 16: mod_base = um
  modified_base 17: mod_base = um
  modified_base 18: mod_base = OTHER; note = guanosine
  modified_base 19: mod_base = OTHER; note = adenosine
  modified_base 20: mod_base = OTHER; note = 2'-deoxythymidine
  modified_base 21: mod_base = OTHER; note = 2'-deoxythymidine
  source 1..21: mol_type = other RNA
gtaggcaagagtgccttgatt

SEQ ID NO: 1044 - RNA, 21 nt, synthetic construct
  modified_base 20..21: mod_base = OTHER; note = thymine
  modified_base 1: mod_base = um
  modified_base 2: mod_base = OTHER; note = adenosine
  modified_base 3: mod_base = OTHER; note = guanosine
  modified_base 4: mod_base = OTHER; note = guanosine
  modified_base 5: mod_base = cm
  modified_base 6: mod_base = OTHER; note = adenosine
  modified_base 7: mod_base = OTHER; note = adenosine
  modified_base 8: mod_base = OTHER; note = guanosine
  modified_base 9: mod_base = OTHER; note = adenosine
  modified_base 10: mod_base = OTHER; note = guanosine
  modified_base 11: mod_base = um
  modified_base 12: mod_base = OTHER; note = guanosine
  modified_base 13: mod_base = cm
  modified_base 14: mod_base = cm
  modified_base 15: mod_base = um
  modified_base 16: mod_base = um
  modified_base 17: mod_base = OTHER; note = guanosine
  modified_base 18: mod_base = OTHER; note = adenosine
  modified_base 19: mod_base = cm
  modified_base 20: mod_base = OTHER; note = 2'-deoxythymidine
  modified_base 21: mod_base = OTHER; note = 2'-deoxythymidine
  source 1..21: mol_type = other RNA
taggcaagagtgccttgactt

SEQ ID NO: 1045 - RNA, 21 nt, synthetic construct
  modified_base 20..21: mod_base = OTHER; note = thymine
  modified_base 1: mod_base = OTHER; note = adenosine
  modified_base 2: mod_base = OTHER; note = guanosine
  modified_base 3: mod_base = OTHER; note = guanosine
  modified_base 4: mod_base = cm
  modified_base 5: mod_base = OTHER; note = adenosine
  modified_base 6: mod_base = OTHER; note = adenosine
  modified_base 7: mod_base = OTHER; note = guanosine
  modified_base 8: mod_base = OTHER; note = adenosine
  modified_base 9: mod_base = OTHER; note = guanosine
  modified_base 10: mod_base = um
  modified_base 11: mod_base = OTHER; note = guanosine
  modified_base 12: mod_base = cm
  modified_base 13: mod_base = cm
  modified_base 14: mod_base = um
  modified_base 15: mod_base = um
  modified_base 16: mod_base = OTHER; note = guanosine
  modified_base 17: mod_base = OTHER; note = adenosine
  modified_base 18: mod_base = cm
  modified_base 19: mod_base = OTHER; note = guanosine
  modified_base 20: mod_base = OTHER; note = 2'-deoxythymidine
  modified_base 21: mod_base = OTHER; note = 2'-deoxythymidine
  source 1..21: mol_type = other RNA
aggcaagagtgccttgacgtt

SEQ ID NO: 1046 - RNA, 21 nt, synthetic construct
  modified_base 20..21: mod_base = OTHER; note = thymine
  modified_base 1: mod_base = OTHER; note = guanosine
  modified_base 2: mod_base = OTHER; note = guanosine
  modified_base 3: mod_base = cm
  modified_base 4: mod_base = OTHER; note = adenosine
  modified_base 5: mod_base = OTHER; note = adenosine
  modified_base 6: mod_base = OTHER; note = guanosine
  modified_base 7: mod_base = OTHER; note = adenosine
  modified_base 8: mod_base = OTHER; note = guanosine
  modified_base 9: mod_base = um
  modified_base 10: mod_base = OTHER; note = guanosine
  modified_base 11: mod_base = cm
  modified_base 12: mod_base = cm
  modified_base 13: mod_base = um
  modified_base 14: mod_base = um
  modified_base 15: mod_base = OTHER; note = guanosine
  modified_base 16: mod_base = OTHER; note = adenosine
  modified_base 17: mod_base = cm
  modified_base 18: mod_base = OTHER; note = guanosine
  modified_base 19: mod_base = OTHER; note = adenosine
  modified_base 20: mod_base = OTHER; note = 2'-deoxythymidine
  modified_base 21: mod_base = OTHER; note = 2'-deoxythymidine
  source 1..21: mol_type = other RNA
ggcaagagtgccttgacgatt

SEQ ID NO: 1047 - RNA, 21 nt, synthetic construct
  modified_base 20..21: mod_base = OTHER; note = thymine
  modified_base 1: mod_base = OTHER; note = guanosine
  modified_base 2: mod_base = cm
  modified_base 3: mod_base = OTHER; note = adenosine
  modified_base 4: mod_base = OTHER; note = adenosine
  modified_base 5: mod_base = OTHER; note = guanosine
  modified_base 6: mod_base = OTHER; note = adenosine
  modified_base 7: mod_base = OTHER; note = guanosine
  modified_base 8: mod_base = um
  modified_base 9: mod_base = OTHER; note = guanosine
  modified_base 10: mod_base = cm
  modified_base 11: mod_base = cm
  modified_base 12: mod_base = um
  modified_base 13: mod_base = um
  modified_base 14: mod_base = OTHER; note = guanosine
  modified_base 15: mod_base = OTHER; note = adenosine
  modified_base 16: mod_base = cm
  modified_base 17: mod_base = OTHER; note = guanosine
  modified_base 18: mod_base = OTHER; note = adenosine
  modified_base 19: mod_base = um
  modified_base 20: mod_base = OTHER; note = 2'-deoxythymidine
  modified_base 21: mod_base = OTHER; note = 2'-deoxythymidine
  source 1..21: mol_type = other RNA
gcaagagtgccttgacgattt

SEQ ID NO: 1048 - RNA, 21 nt, synthetic construct
  modified_base 20..21: mod_base = OTHER; note = thymine
  modified_base 1: mod_base = cm
  modified_base 2: mod_base = OTHER; note = adenosine
  modified_base 3: mod_base = OTHER; note = adenosine
  modified_base 4: mod_base = OTHER; note = guanosine
  modified_base 5: mod_base = OTHER; note = adenosine
  modified_base 6: mod_base = OTHER; note = guanosine
  modified_base 7: mod_base = um
  modified_base 8: mod_base = OTHER; note = guanosine
  modified_base 9: mod_base = cm
  modified_base 10: mod_base = cm
  modified_base 11: mod_base = um
  modified_base 12: mod_base = um
  modified_base 13: mod_base = OTHER; note = guanosine
  modified_base 14: mod_base = OTHER; note = adenosine
  modified_base 15: mod_base = cm
  modified_base 16: mod_base = OTHER; note = guanosine
  modified_base 17: mod_base = OTHER; note = adenosine
  modified_base 18: mod_base = um
  modified_base 19: mod_base = OTHER; note = adenosine
  modified_base 20: mod_base = OTHER; note = 2'-deoxythymidine
  modified_base 21: mod_base = OTHER; note = 2'-deoxythymidine
  source 1..21: mol_type = other RNA
caagagtgccttgacgatatt

SEQ ID NO: 1049 - RNA, 21 nt, synthetic construct
  modified_base 20..21: mod_base = OTHER; note = thymine
  modified_base 1: mod_base = OTHER; note = adenosine
  modified_base 2: mod_base = OTHER; note = adenosine
  modified_base 3: mod_base = OTHER; note = guanosine
  modified_base 4: mod_base = OTHER; note = adenosine
  modified_base 5: mod_base = OTHER; note = guanosine
  modified_base 6: mod_base = um
  modified_base 7: mod_base = OTHER; note = guanosine
  modified_base 8: mod_base = cm
  modified_base 9: mod_base = cm
  modified_base 10: mod_base = um
  modified_base 11: mod_base = um
  modified_base 12: mod_base = OTHER; note = guanosine
  modified_base 13: mod_base = OTHER; note = adenosine
  modified_base 14: mod_base = cm
  modified_base 15: mod_base = OTHER; note = guanosine
  modified_base 16: mod_base = OTHER; note = adenosine
  modified_base 17: mod_base = um
  modified_base 18: mod_base = OTHER; note = adenosine
  modified_base 19: mod_base = cm
  modified_base 20: mod_base = OTHER; note = 2'-deoxythymidine
  modified_base 21: mod_base = OTHER; note = 2'-deoxythymidine
  source 1..21: mol_type = other RNA
aagagtgccttgacgatactt

SEQ ID NO: 1050 - RNA, 21 nt, synthetic construct
  modified_base 20..21: mod_base = OTHER; note = thymine
  modified_base 1: mod_base = OTHER; note = adenosine
  modified_base 2: mod_base = OTHER; note = guanosine
  modified_base 3: mod_base = OTHER; note = adenosine
  modified_base 4: mod_base = OTHER; note = guanosine
  modified_base 5: mod_base = um
  modified_base 6: mod_base = OTHER; note = guanosine
  modified_base 7: mod_base = cm
  modified_base 8: mod_base = cm
  modified_base 9: mod_base = um
  modified_base 10: mod_base = um
  modified_base 11: mod_base = OTHER; note = guanosine
  modified_base 12: mod_base = OTHER; note = adenosine
  modified_base 13: mod_base = cm
  modified_base 14: mod_base = OTHER; note = guanosine
  modified_base 15: mod_base = OTHER; note = adenosine
  modified_base 16: mod_base = um
  modified_base 17: mod_base = OTHER; note = adenosine
  modified_base 18: mod_base = cm
  modified_base 19: mod_base = OTHER; note = adenosine
  modified_base 20: mod_base = OTHER; note = 2'-deoxythymidine
  modified_base 21: mod_base = OTHER; note = 2'-deoxythymidine
  source 1..21: mol_type = other RNA
agagtgccttgacgatacatt

SEQ ID NO: 1051 - RNA, 21 nt, synthetic construct
  modified_base 20..21: mod_base = OTHER; note = thymine
  modified_base 1: mod_base = OTHER; note = guanosine
  modified_base 2: mod_base = OTHER; note = adenosine
  modified_base 3: mod_base = OTHER; note = guanosine
  modified_base 4: mod_base = um
  modified_base 5: mod_base = OTHER; note = guanosine
  modified_base 6: mod_base = cm
  modified_base 7: mod_base = cm
  modified_base 8: mod_base = um
  modified_base 9: mod_base = um
  modified_base 10: mod_base = OTHER; note = guanosine
  modified_base 11: mod_base = OTHER; note = adenosine
  modified_base 12: mod_base = cm
  modified_base 13: mod_base = OTHER; note = guanosine
  modified_base 14: mod_base = OTHER; note = adenosine
  modified_base 15: mod_base = um
  modified_base 16: mod_base = OTHER; note = adenosine
  modified_base 17: mod_base = cm
  modified_base 18: mod_base = OTHER; note = adenosine
  modified_base 19: mod_base = OTHER; note = guanosine
  modified_base 20: mod_base = OTHER; note = 2'-deoxythymidine
  modified_base 21: mod_base = OTHER; note = 2'-deoxythymidine
  source 1..21: mol_type = other RNA
gagtgccttgacgatacagtt

SEQ ID NO: 1052 - RNA, 21 nt, synthetic construct
  modified_base 20..21: mod_base = OTHER; note = thymine
  modified_base 1: mod_base = OTHER; note = adenosine
  modified_base 2: mod_base = OTHER; note = guanosine
  modified_base 3: mod_base = um
  modified_base 4: mod_base = OTHER; note = guanosine
  modified_base 5: mod_base = cm
  modified_base 6: mod_base = cm
  modified_base 7: mod_base = um
  modified_base 8: mod_base = um
  modified_base 9: mod_base = OTHER; note = guanosine
  modified_base 10: mod_base = OTHER; note = adenosine
  modified_base 11: mod_base = cm
  modified_base 12: mod_base = OTHER; note = guanosine
  modified_base 13: mod_base = OTHER; note = adenosine
  modified_base 14: mod_base = um
  modified_base 15: mod_base = OTHER; note = adenosine
  modified_base 16: mod_base = cm
  modified_base 17: mod_base = OTHER; note = adenosine
  modified_base 18: mod_base = OTHER; note = guanosine
  modified_base 19: mod_base = cm
  modified_base 20: mod_base = OTHER; note = 2'-deoxythymidine
  modified_base 21: mod_base = OTHER; note = 2'-deoxythymidine
  source 1..21: mol_type = other RNA
agtgccttgacgatacagctt

SEQ ID NO: 1053 - RNA, 21 nt, synthetic construct
  modified_base 20..21: mod_base = OTHER; note = thymine
  modified_base 1: mod_base = OTHER; note = guanosine
  modified_base 2: mod_base = um
  modified_base 3: mod_base = OTHER; note = guanosine
  modified_base 4: mod_base = cm
  modified_base 5: mod_base = cm
  modified_base 6: mod_base = um
  modified_base 7: mod_base = um
  modified_base 8: mod_base = OTHER; note = guanosine
  modified_base 9: mod_base = OTHER; note = adenosine
  modified_base 10: mod_base = cm
  modified_base 11: mod_base = OTHER; note = guanosine
  modified_base 12: mod_base = OTHER; note = adenosine
  modified_base 13: mod_base = um
  modified_base 14: mod_base = OTHER; note = adenosine
  modified_base 15: mod_base = cm
  modified_base 16: mod_base = OTHER; note = adenosine
  modified_base 17: mod_base = OTHER; note = guanosine
  modified_base 18: mod_base = cm
  modified_base 19: mod_base = um
  modified_base 20: mod_base = OTHER; note = 2'-deoxythymidine
  modified_base 21: mod_base = OTHER; note = 2'-deoxythymidine
  source 1..21: mol_type = other RNA
gtgccttgacgatacagcttt

SEQ ID NO: 1054 - RNA, 21 nt, synthetic construct
  modified_base 20..21: mod_base = OTHER; note = thymine
  modified_base 1: mod_base = um
  modified_base 2: mod_base = OTHER; note = guanosine
  modified_base 3: mod_base = cm
  modified_base 4: mod_base = cm
  modified_base 5: mod_base = um
  modified_base 6: mod_base = um
  modified_base 7: mod_base = OTHER; note = guanosine
  modified_base 8: mod_base = OTHER; note = adenosine
  modified_base 9: mod_base = cm
  modified_base 10: mod_base = OTHER; note = guanosine
  modified_base 11: mod_base = OTHER; note = adenosine
  modified_base 12: mod_base = um
  modified_base 13: mod_base = OTHER; note = adenosine
  modified_base 14: mod_base = cm
  modified_base 15: mod_base = OTHER; note = adenosine
  modified_base 16: mod_base = OTHER; note = guanosine
  modified_base 17: mod_base = cm
  modified_base 18: mod_base = um
  modified_base 19: mod_base = OTHER; note = adenosine
  modified_base 20: mod_base = OTHER; note = 2'-deoxythymidine
  modified_base 21: mod_base = OTHER; note = 2'-deoxythymidine
  source 1..21: mol_type = other RNA
tgccttgacgatacagctatt

SEQ ID NO: 1055 - RNA, 21 nt, synthetic construct
  modified_base 20..21: mod_base = OTHER; note = thymine
  modified_base 1: mod_base = OTHER; note = guanosine
  modified_base 2: mod_base = cm
  modified_base 3: mod_base = cm
  modified_base 4: mod_base = um
  modified_base 5: mod_base = um
  modified_base 6: mod_base = OTHER; note = guanosine
  modified_base 7: mod_base = OTHER; note = adenosine
  modified_base 8: mod_base = cm
  modified_base 9: mod_base = OTHER; note = guanosine
  modified_base 10: mod_base = OTHER; note = adenosine
  modified_base 11: mod_base = um
  modified_base 12: mod_base = OTHER; note = adenosine
  modified_base 13: mod_base = cm
  modified_base 14: mod_base = OTHER; note = adenosine
  modified_base 15: mod_base = OTHER; note = guanosine
  modified_base 16: mod_base = cm
  modified_base 17: mod_base = um
  modified_base 18: mod_base = OTHER; note = adenosine
  modified_base 19: mod_base = OTHER; note = adenosine
  modified_base 20: mod_base = OTHER; note = 2'-deoxythymidine
  modified_base 21: mod_base = OTHER; note = 2'-deoxythymidine
  source 1..21: mol_type = other RNA
gccttgacgatacagctaatt

SEQ ID NO: 1056 - RNA, 21 nt, synthetic construct
  modified_base 20..21: mod_base = OTHER; note = thymine
  modified_base 1: mod_base = cm
  modified_base 2: mod_base = cm
  modified_base 3: mod_base = um
  modified_base 4: mod_base = um
  modified_base 5: mod_base = OTHER; note = guanosine
  modified_base 6: mod_base = OTHER; note = adenosine
  modified_base 7: mod_base = cm
  modified_base 8: mod_base = OTHER; note = guanosine
  modified_base 9: mod_base = OTHER; note = adenosine
  modified_base 10: mod_base = um
  modified_base 11: mod_base = OTHER; note = adenosine
  modified_base 12: mod_base = cm
  modified_base 13: mod_base = OTHER; note = adenosine
  modified_base 14: mod_base = OTHER; note = guanosine
  modified_base 15: mod_base = cm
  modified_base 16: mod_base = um
  modified_base 17: mod_base = OTHER; note = adenosine
  modified_base 18: mod_base = OTHER; note = adenosine
  modified_base 19: mod_base = um
  modified_base 20: mod_base = OTHER; note = 2'-deoxythymidine
  modified_base 21: mod_base = OTHER; note = 2'-deoxythymidine
  source 1..21: mol_type = other RNA
ccttgacgatacagctaattt

SEQ ID NO: 1057 - RNA, 21 nt, synthetic construct
  modified_base 20..21: mod_base = OTHER; note = thymine
  modified_base 1: mod_base = cm
  modified_base 2: mod_base = um
  modified_base 3: mod_base = um
  modified_base 4: mod_base = OTHER; note = guanosine
  modified_base 5: mod_base = OTHER; note = adenosine
  modified_base 6: mod_base = cm
  modified_base 7: mod_base = OTHER; note = guanosine
  modified_base 8: mod_base = OTHER; note = adenosine
  modified_base 9: mod_base = um
  modified_base 10: mod_base = OTHER; note = adenosine
  modified_base 11: mod_base = cm
  modified_base 12: mod_base = OTHER; note = adenosine
  modified_base 13: mod_base = OTHER; note = guanosine
  modified_base 14: mod_base = cm
  modified_base 15: mod_base = um
  modified_base 16: mod_base = OTHER; note = adenosine
  modified_base 17: mod_base = OTHER; note = adenosine
  modified_base 18: mod_base = um
  modified_base 19: mod_base = um
  modified_base 20: mod_base = OTHER; note = 2'-deoxythymidine
  modified_base 21: mod_base = OTHER; note = 2'-deoxythymidine
  source 1..21: mol_type = other RNA
cttgacgatacagctaatttt

SEQ ID NO: 1058 - RNA, 21 nt, synthetic construct
  modified_base 20..21: mod_base = OTHER; note = thymine
  modified_base 1: mod_base = um
  modified_base 2: mod_base = um
  modified_base 3: mod_base = OTHER; note = guanosine
  modified_base 4: mod_base = OTHER; note = adenosine
  modified_base 5: mod_base = cm
  modified_base 6: mod_base = OTHER; note = guanosine
  modified_base 7: mod_base = OTHER; note = adenosine
  modified_base 8: mod_base = um
  modified_base 9: mod_base = OTHER; note = adenosine
  modified_base 10: mod_base = cm
  modified_base 11: mod_base = OTHER; note = adenosine
  modified_base 12: mod_base = OTHER; note = guanosine
  modified_base 13: mod_base = cm
  modified_base 14: mod_base = um
  modified_base 15: mod_base = OTHER; note = adenosine
  modified_base 16: mod_base = OTHER; note = adenosine
  modified_base 17: mod_base = um
  modified_base 18: mod_base = um
  modified_base 19: mod_base = cm
  modified_base 20: mod_base = OTHER; note = 2'-deoxythymidine
  modified_base 21: mod_base = OTHER; note = 2'-deoxythymidine
  source 1..21: mol_type = other RNA
ttgacgatacagctaattctt

SEQ ID NO: 1059 - RNA, 21 nt, synthetic construct
  modified_base 20..21: mod_base = OTHER; note = thymine
  modified_base 1: mod_base = um
  modified_base 2: mod_base = OTHER; note = guanosine
  modified_base 3: mod_base = OTHER; note = adenosine
  modified_base 4: mod_base = cm
  modified_base 5: mod_base = OTHER; note = guanosine
  modified_base 6: mod_base = OTHER; note = adenosine
  modified_base 7: mod_base = um
  modified_base 8: mod_base = OTHER; note = adenosine
  modified_base 9: mod_base = cm
  modified_base 10: mod_base = OTHER; note = adenosine
  modified_base 11: mod_base = OTHER; note = guanosine
  modified_base 12: mod_base = cm
  modified_base 13: mod_base = um
  modified_base 14: mod_base = OTHER; note = adenosine
  modified_base 15: mod_base = OTHER; note = adenosine
  modified_base 16: mod_base = um
  modified_base 17: mod_base = um
  modified_base 18: mod_base = cm
  modified_base 19: mod_base = OTHER; note = adenosine
  modified_base 20: mod_base = OTHER; note = 2'-deoxythymidine
  modified_base 21: mod_base = OTHER; note = 2'-deoxythymidine
  source 1..21: mol_type = other RNA
tgacgatacagctaattcatt

SEQ ID NO: 1060 - RNA, 21 nt, synthetic construct
  modified_base 20..21: mod_base = OTHER; note = thymine
  modified_base 1: mod_base = OTHER; note = guanosine
  modified_base 2: mod_base = OTHER; note = adenosine
  modified_base 3: mod_base = cm
  modified_base 4: mod_base = OTHER; note = guanosine
  modified_base 5: mod_base = OTHER; note = adenosine
  modified_base 6: mod_base = um
  modified_base 7: mod_base = OTHER; note = adenosine
  modified_base 8: mod_base = cm
  modified_base 9: mod_base = OTHER; note = adenosine
  modified_base 10: mod_base = OTHER; note = guanosine
  modified_base 11: mod_base = cm
  modified_base 12: mod_base = um
  modified_base 13: mod_base = OTHER; note = adenosine
  modified_base 14: mod_base = OTHER; note = adenosine
  modified_base 15: mod_base = um
  modified_base 16: mod_base = um
  modified_base 17: mod_base = cm
  modified_base 18: mod_base = OTHER; note = adenosine
  modified_base 19: mod_base = OTHER; note = guanosine
  modified_base 20: mod_base = OTHER; note = 2'-deoxythymidine
  modified_base 21: mod_base = OTHER; note = 2'-deoxythymidine
  source 1..21: mol_type = other RNA
gacgatacagctaattcagtt

SEQ ID NO: 1061 - RNA, 21 nt, synthetic construct
  modified_base 20..21: mod_base = OTHER; note = thymine
  modified_base 1: mod_base = OTHER; note = adenosine
  modified_base 2: mod_base = cm
  modified_base 3: mod_base = OTHER; note = guanosine
  modified_base 4: mod_base = OTHER; note = adenosine
  modified_base 5: mod_base = um
  modified_base 6: mod_base = OTHER; note = adenosine
  modified_base 7: mod_base = cm
  modified_base 8: mod_base = OTHER; note = adenosine
  modified_base 9: mod_base = OTHER; note = guanosine
  modified_base 10: mod_base = cm
  modified_base 11: mod_base = um
  modified_base 12: mod_base = OTHER; note = adenosine
  modified_base 13: mod_base = OTHER; note = adenosine
  modified_base 14: mod_base = um
  modified_base 15: mod_base = um
  modified_base 16: mod_base = cm
  modified_base 17: mod_base = OTHER; note = adenosine
  modified_base 18: mod_base = OTHER; note = guanosine
  modified_base 19: mod_base = OTHER; note = adenosine
  modified_base 20: mod_base = OTHER; note = 2'-deoxythymidine
  modified_base 21: mod_base = OTHER; note = 2'-deoxythymidine
  source 1..21: mol_type = other RNA
acgatacagctaattcagatt

SEQ ID NO: 1062 - RNA, 21 nt, synthetic construct
  modified_base 20..21: mod_base = OTHER; note = thymine
  modified_base 1: mod_base = cm
  modified_base 2: mod_base = OTHER; note = guanosine
  modified_base 3: mod_base = OTHER; note = adenosine
  modified_base 4: mod_base = um
  modified_base 5: mod_base = OTHER; note = adenosine
  modified_base 6: mod_base = cm
  modified_base 7: mod_base = OTHER; note = adenosine
  modified_base 8: mod_base = OTHER; note = guanosine
  modified_base 9: mod_base = cm
  modified_base 10: mod_base = um
  modified_base 11: mod_base = OTHER; note = adenosine
  modified_base 12: mod_base = OTHER; note = adenosine
  modified_base 13: mod_base = um
  modified_base 14: mod_base = um
  modified_base 15: mod_base = cm
  modified_base 16: mod_base = OTHER; note = adenosine
  modified_base 17: mod_base = OTHER; note = guanosine
  modified_base 18: mod_base = OTHER; note = adenosine
  modified_base 19: mod_base = OTHER; note = adenosine
  modified_base 20: mod_base = OTHER; note = 2'-deoxythymidine
  modified_base 21: mod_base = OTHER; note = 2'-deoxythymidine
  source 1..21: mol_type = other RNA
cgatacagctaattcagaatt

SEQ ID NO: 1063 - RNA, 21 nt, synthetic construct
  modified_base 20..21: mod_base = OTHER; note = thymine
  modified_base 1: mod_base = OTHER; note = guanosine
  modified_base 2: mod_base = OTHER; note = adenosine
  modified_base 3: mod_base = um
  modified_base 4: mod_base = OTHER; note = adenosine
  modified_base 5: mod_base = cm
  modified_base 6: mod_base = OTHER; note = adenosine
  modified_base 7: mod_base = OTHER; note = guanosine
  modified_base 8: mod_base = cm
  modified_base 9: mod_base = um
  modified_base 10: mod_base = OTHER; note = adenosine
  modified_base 11: mod_base = OTHER; note = adenosine
  modified_base 12: mod_base = um
  modified_base 13: mod_base = um
  modified_base 14: mod_base = cm
  modified_base 15: mod_base = OTHER; note = adenosine
  modified_base 16: mod_base = OTHER; note = guanosine
  modified_base 17: mod_base = OTHER; note = adenosine
  modified_base 18: mod_base = OTHER; note = adenosine
  modified_base 19: mod_base = um
  modified_base 20: mod_base = OTHER; note = 2'-deoxythymidine
  modified_base 21: mod_base = OTHER; note = 2'-deoxythymidine
  source 1..21: mol_type = other RNA
gatacagctaattcagaattt

SEQ ID NO: 1064 - RNA, 21 nt, synthetic construct
  modified_base 20..21: mod_base = OTHER; note = thymine
  modified_base 1: mod_base = OTHER; note = adenosine
  modified_base 2: mod_base = um
  modified_base 3: mod_base = OTHER; note = adenosine
  modified_base 4: mod_base = cm
  modified_base 5: mod_base = OTHER; note = adenosine
  modified_base 6: mod_base = OTHER; note = guanosine
  modified_base 7: mod_base = cm
  modified_base 8: mod_base = um
  modified_base 9: mod_base = OTHER; note = adenosine
  modified_base 10: mod_base = OTHER; note = adenosine
  modified_base 11: mod_base = um
  modified_base 12: mod_base = um
  modified_base 13: mod_base = cm
  modified_base 14: mod_base = OTHER; note = adenosine
  modified_base 15: mod_base = OTHER; note = guanosine
  modified_base 16: mod_base = OTHER; note = adenosine
  modified_base 17: mod_base = OTHER; note = adenosine
  modified_base 18: mod_base = um
  modified_base 19: mod_base = cm
  modified_base 20: mod_base = OTHER; note = 2'-deoxythymidine
  modified_base 21: mod_base = OTHER; note = 2'-deoxythymidine
  source 1..21: mol_type = other RNA
atacagctaattcagaatctt

SEQ ID NO: 1065 - RNA, 21 nt, synthetic construct
  modified_base 20..21: mod_base = OTHER; note = thymine
  modified_base 1: mod_base = um
  modified_base 2: mod_base = OTHER; note = adenosine
  modified_base 3: mod_base = cm
  modified_base 4: mod_base = OTHER; note = adenosine
  modified_base 5: mod_base = OTHER; note = guanosine
  modified_base 6: mod_base = cm
  modified_base 7: mod_base = um
  modified_base 8: mod_base = OTHER; note = adenosine
  modified_base 9: mod_base = OTHER; note = adenosine
  modified_base 10: mod_base = um
  modified_base 11: mod_base = um
  modified_base 12: mod_base = cm
  modified_base 13: mod_base = OTHER; note = adenosine
  modified_base 14: mod_base = OTHER; note = guanosine
  modified_base 15: mod_base = OTHER; note = adenosine
  modified_base 16: mod_base = OTHER; note = adenosine
  modified_base 17: mod_base = um
  modified_base 18: mod_base = cm
  modified_base 19: mod_base = OTHER; note = adenosine
  modified_base 20: mod_base = OTHER; note = 2'-deoxythymidine
  modified_base 21: mod_base = OTHER; note = 2'-deoxythymidine
  source 1..21: mol_type = other RNA
tacagctaattcagaatcatt

SEQ ID NO: 1066 - RNA, 21 nt, synthetic construct
  modified_base 20..21: mod_base = OTHER; note = thymine
  modified_base 1: mod_base = OTHER; note = adenosine
  modified_base 2: mod_base = cm
  modified_base 3: mod_base = OTHER; note = adenosine
  modified_base 4: mod_base = OTHER; note = guanosine
  modified_base 5: mod_base = cm
  modified_base 6: mod_base = um
  modified_base 7: mod_base = OTHER; note = adenosine
  modified_base 8: mod_base = OTHER; note = adenosine
  modified_base 9: mod_base = um
  modified_base 10: mod_base = um
  modified_base 11: mod_base = cm
  modified_base 12: mod_base = OTHER; note = adenosine
  modified_base 13: mod_base = OTHER; note = guanosine
  modified_base 14: mod_base = OTHER; note = adenosine
  modified_base 15: mod_base = OTHER; note = adenosine
  modified_base 16: mod_base = um
  modified_base 17: mod_base = cm
  modified_base 18: mod_base = OTHER; note = adenosine
  modified_base 19: mod_base = um
  modified_base 20: mod_base = OTHER; note = 2'-deoxythymidine
  modified_base 21: mod_base = OTHER; note = 2'-deoxythymidine
  source 1..21: mol_type = other RNA
acagctaattcagaatcattt

SEQ ID NO: 1067 - RNA, 21 nt, synthetic construct
  modified_base 20..21: mod_base = OTHER; note = thymine
  modified_base 1: mod_base = cm
  modified_base 2: mod_base = OTHER; note = adenosine
  modified_base 3: mod_base = OTHER; note = guanosine
  modified_base 4: mod_base = cm
  modified_base 5: mod_base = um
  modified_base 6: mod_base = OTHER; note = adenosine
  modified_base 7: mod_base = OTHER; note = adenosine
  modified_base 8: mod_base = um
  modified_base 9: mod_base = um
  modified_base 10: mod_base = cm
  modified_base 11: mod_base = OTHER; note = adenosine
  modified_base 12: mod_base = OTHER; note = guanosine
  modified_base 13: mod_base = OTHER; note = adenosine
  modified_base 14: mod_base = OTHER; note = adenosine
  modified_base 15: mod_base = um
  modified_base 16: mod_base = cm
  modified_base 17: mod_base = OTHER; note = adenosine
  modified_base 18: mod_base = um
  modified_base 19: mod_base = um
  modified_base 20: mod_base = OTHER; note = 2'-deoxythymidine
  modified_base 21: mod_base = OTHER; note = 2'-deoxythymidine
  source 1..21: mol_type = other RNA
cagctaattcagaatcatttt

SEQ ID NO: 1068 - RNA, 21 nt, synthetic construct
  modified_base 20..21: mod_base = OTHER; note = thymine
  modified_base 1: mod_base = OTHER; note = adenosine
  modified_base 2: mod_base = OTHER; note = guanosine
  modified_base 3: mod_base = cm
  modified_base 4: mod_base = um
  modified_base 5: mod_base = OTHER; note = adenosine
  modified_base 6: mod_base = OTHER; note = adenosine
  modified_base 7: mod_base = um
  modified_base 8: mod_base = um
  modified_base 9: mod_base = cm
  modified_base 10: mod_base = OTHER; note = adenosine
  modified_base 11: mod_base = OTHER; note = guanosine
  modified_base 12: mod_base = OTHER; note = adenosine
  modified_base 13: mod_base = OTHER; note = adenosine
  modified_base 14: mod_base = um
  modified_base 15: mod_base = cm
  modified_base 16: mod_base = OTHER; note = adenosine
  modified_base 17: mod_base = um
  modified_base 18: mod_base = um
  modified_base 19: mod_base = um
  modified_base 20: mod_base = OTHER; note = 2'-deoxythymidine
  modified_base 21: mod_base = OTHER; note = 2'-deoxythymidine
  source 1..21: mol_type = other RNA
agctaattcagaatcattttt

SEQ ID NO: 1069 - RNA, 21 nt, synthetic construct
  modified_base 20..21: mod_base = OTHER; note = thymine
  modified_base 1: mod_base = OTHER; note = guanosine
  modified_base 2: mod_base = cm
  modified_base 3: mod_base = um
  modified_base 4: mod_base = OTHER; note = adenosine
  modified_base 5: mod_base = OTHER; note = adenosine
  modified_base 6: mod_base = um
  modified_base 7: mod_base = um
  modified_base 8: mod_base = cm
  modified_base 9: mod_base = OTHER; note = adenosine
  modified_base 10: mod_base = OTHER; note = guanosine
  modified_base 11: mod_base = OTHER; note = adenosine
  modified_base 12: mod_base = OTHER; note = adenosine
  modified_base 13: mod_base = um
  modified_base 14: mod_base = cm
  modified_base 15: mod_base = OTHER; note = adenosine
  modified_base 16: mod_base = um
  modified_base 17: mod_base = um
  modified_base 18: mod_base = um
  modified_base 19: mod_base = um
  modified_base 20: mod_base = OTHER; note = 2'-deoxythymidine
  modified_base 21: mod_base = OTHER; note = 2'-deoxythymidine
  source 1..21: mol_type = other RNA
gctaattcagaatcatttttt

SEQ ID NO: 1070 - RNA, 21 nt, synthetic construct
  modified_base 20..21: mod_base = OTHER; note = thymine
  modified_base 1: mod_base = cm
  modified_base 2: mod_base = um
  modified_base 3: mod_base = OTHER; note = adenosine
  modified_base 4: mod_base = OTHER; note = adenosine
  modified_base 5: mod_base = um
  modified_base 6: mod_base = um
  modified_base 7: mod_base = cm
  modified_base 8: mod_base = OTHER; note = adenosine
  modified_base 9: mod_base = OTHER; note = guanosine
  modified_base 10: mod_base = OTHER; note = adenosine
  modified_base 11: mod_base = OTHER; note = adenosine
  modified_base 12: mod_base = um
  modified_base 13: mod_base = cm
  modified_base 14: mod_base = OTHER; note = adenosine
  modified_base 15: mod_base = um
  modified_base 16: mod_base = um
  modified_base 17: mod_base = um
  modified_base 18: mod_base = um
  modified_base 19: mod_base = OTHER; note = guanosine
  modified_base 20: mod_base = OTHER; note = 2'-deoxythymidine
  modified_base 21: mod_base = OTHER; note = 2'-deoxythymidine
  source 1..21: mol_type = other RNA
ctaattcagaatcattttgtt

SEQ ID NO: 1071 - RNA, 21 nt, synthetic construct
  modified_base 20..21: mod_base = OTHER; note = thymine
  modified_base 1: mod_base = um
  modified_base 2: mod_base = OTHER; note = adenosine
  modified_base 3: mod_base = OTHER; note = adenosine
  modified_base 4: mod_base = um
  modified_base 5: mod_base = um
  modified_base 6: mod_base = cm
  modified_base 7: mod_base = OTHER; note = adenosine
  modified_base 8: mod_base = OTHER; note = guanosine
  modified_base 9: mod_base = OTHER; note = adenosine
  modified_base 10: mod_base = OTHER; note = adenosine
  modified_base 11: mod_base = um
  modified_base 12: mod_base = cm
  modified_base 13: mod_base = OTHER; note = adenosine
  modified_base 14: mod_base = um
  modified_base 15: mod_base = um
  modified_base 16: mod_base = um
  modified_base 17: mod_base = um
  modified_base 18: mod_base = OTHER; note = guanosine
  modified_base 19: mod_base = um
  modified_base 20: mod_base = OTHER; note = 2'-deoxythymidine
  modified_base 21: mod_base = OTHER; note = 2'-deoxythymidine
  source 1..21: mol_type = other RNA
taattcagaatcattttgttt

SEQ ID NO: 1072 - RNA, 21 nt, synthetic construct
  modified_base 20..21: mod_base = OTHER; note = thymine
  modified_base 1: mod_base = OTHER; note = adenosine
  modified_base 2: mod_base = OTHER; note = adenosine
  modified_base 3: mod_base = um
  modified_base 4: mod_base = um
  modified_base 5: mod_base = cm
  modified_base 6: mod_base = OTHER; note = adenosine
  modified_base 7: mod_base = OTHER; note = guanosine
  modified_base 8: mod_base = OTHER; note = adenosine
  modified_base 9: mod_base = OTHER; note = adenosine
  modified_base 10: mod_base = um
  modified_base 11: mod_base = cm
  modified_base 12: mod_base = OTHER; note = adenosine
  modified_base 13: mod_base = um
  modified_base 14: mod_base = um
  modified_base 15: mod_base = um
  modified_base 16: mod_base = um
  modified_base 17: mod_base = OTHER; note = guanosine
  modified_base 18: mod_base = um
  modified_base 19: mod_base = OTHER; note = guanosine
  modified_base 20: mod_base = OTHER; note = 2'-deoxythymidine
  modified_base 21: mod_base = OTHER; note = 2'-deoxythymidine
  source 1..21: mol_type = other RNA
aattcagaatcattttgtgtt

SEQ ID NO: 1073 - RNA, 21 nt, synthetic construct
  modified_base 20..21: mod_base = OTHER; note = thymine
  modified_base 1: mod_base = OTHER; note = adenosine
  modified_base 2: mod_base = um
  modified_base 3: mod_base = um
  modified_base 4: mod_base = cm
  modified_base 5: mod_base = OTHER; note = adenosine
  modified_base 6: mod_base = OTHER; note = guanosine
  modified_base 7: mod_base = OTHER; note = adenosine
  modified_base 8: mod_base = OTHER; note = adenosine
  modified_base 9: mod_base = um
  modified_base 10: mod_base = cm
  modified_base 11: mod_base = OTHER; note = adenosine
  modified_base 12: mod_base = um
  modified_base 13: mod_base = um
  modified_base 14: mod_base = um
  modified_base 15: mod_base = um
  modified_base 16: mod_base = OTHER; note = guanosine
  modified_base 17: mod_base = um
  modified_base 18: mod_base = OTHER; note = guanosine
  modified_base 19: mod_base = OTHER; note = guanosine
  modified_base 20: mod_base = OTHER; note = 2'-deoxythymidine
  modified_base 21: mod_base = OTHER; note = 2'-deoxythymidine
  source 1..21: mol_type = other RNA
attcagaatcattttgtggtt

SEQ ID NO: 1074 - RNA, 21 nt, synthetic construct
  modified_base 20..21: mod_base = OTHER; note = thymine
  modified_base 1: mod_base = um
  modified_base 2: mod_base = um
  modified_base 3: mod_base = cm
  modified_base 4: mod_base = OTHER; note = adenosine
  modified_base 5: mod_base = OTHER; note = guanosine
  modified_base 6: mod_base = OTHER; note = adenosine
  modified_base 7: mod_base = OTHER; note = adenosine
  modified_base 8: mod_base = um
  modified_base 9: mod_base = cm
  modified_base 10: mod_base = OTHER; note = adenosine
  modified_base 11: mod_base = um
  modified_base 12: mod_base = um
  modified_base 13: mod_base = um
  modified_base 14: mod_base = um
  modified_base 15: mod_base = OTHER; note = guanosine
  modified_base 16: mod_base = um
  modified_base 17: mod_base = OTHER; note = guanosine
  modified_base 18: mod_base = OTHER; note = guanosine
  modified_base 19: mod_base = OTHER; note = adenosine
  modified_base 20: mod_base = OTHER; note = 2'-deoxythymidine
  modified_base 21: mod_base = OTHER; note = 2'-deoxythymidine
  source 1..21: mol_type = other RNA
ttcagaatcattttgtggatt

SEQ ID NO: 1075 - RNA, 21 nt, synthetic construct
  modified_base 20..21: mod_base = OTHER; note = thymine
  modified_base 1: mod_base = um
  modified_base 2: mod_base = cm
  modified_base 3: mod_base = OTHER; note = adenosine
  modified_base 4: mod_base = OTHER; note = guanosine
  modified_base 5: mod_base = OTHER; note = adenosine
  modified_base 6: mod_base = OTHER; note = adenosine
  modified_base 7: mod_base = um
  modified_base 8: mod_base = cm
  modified_base 9: mod_base = OTHER; note = adenosine
  modified_base 10: mod_base = um
  modified_base 11: mod_base = um
  modified_base 12: mod_base = um
  modified_base 13: mod_base = um
  modified_base 14: mod_base = OTHER; note = guanosine
  modified_base 15: mod_base = um
  modified_base 16: mod_base = OTHER; note = guanosine
  modified_base 17: mod_base = OTHER; note = guanosine
  modified_base 18: mod_base = OTHER; note = adenosine
  modified_base 19: mod_base = cm
  modified_base 20: mod_base = OTHER; note = 2'-deoxythymidine
  modified_base 21: mod_base = OTHER; note = 2'-deoxythymidine
  source 1..21: mol_type = other RNA
tcagaatcattttgtggactt

SEQ ID NO: 1076 - RNA, 21 nt, synthetic construct
  modified_base 20..21: mod_base = OTHER; note = thymine
  modified_base 1: mod_base = cm
  modified_base 2: mod_base = OTHER; note = adenosine
  modified_base 3: mod_base = OTHER; note = guanosine
  modified_base 4: mod_base = OTHER; note = adenosine
  modified_base 5: mod_base = OTHER; note = adenosine
  modified_base 6: mod_base = um
  modified_base 7: mod_base = cm
  modified_base 8: mod_base = OTHER; note = adenosine
  modified_base 9: mod_base = um
  modified_base 10: mod_base = um
  modified_base 11: mod_base = um
  modified_base 12: mod_base = um
  modified_base 13: mod_base = OTHER; note = guanosine
  modified_base 14: mod_base = um
  modified_base 15: mod_base = OTHER; note = guanosine
  modified_base 16: mod_base = OTHER; note = guanosine
  modified_base 17: mod_base = OTHER; note = adenosine
  modified_base 18: mod_base = cm
  modified_base 19: mod_base = OTHER; note = guanosine
  modified_base 20: mod_base = OTHER; note = 2'-deoxythymidine
  modified_base 21: mod_base = OTHER; note = 2'-deoxythymidine
  source 1..21: mol_type = other RNA
cagaatcattttgtggacgtt

SEQ ID NO: 1077 - RNA, 21 nt, synthetic construct
  modified_base 20..21: mod_base = OTHER; note = thymine
  modified_base 1: mod_base = OTHER; note = adenosine
  modified_base 2: mod_base = OTHER; note = guanosine
  modified_base 3: mod_base = OTHER; note = adenosine
  modified_base 4: mod_base = OTHER; note = adenosine
  modified_base 5: mod_base = um
  modified_base 6: mod_base = cm
  modified_base 7: mod_base = OTHER; note = adenosine
  modified_base 8: mod_base = um
  modified_base 9: mod_base = um
  modified_base 10: mod_base = um
  modified_base 11: mod_base = um
  modified_base 12: mod_base = OTHER; note = guanosine
  modified_base 13: mod_base = um
  modified_base 14: mod_base = OTHER; note = guanosine
  modified_base 15: mod_base = OTHER; note = guanosine
  modified_base 16: mod_base = OTHER; note = adenosine
  modified_base 17: mod_base = cm
  modified_base 18: mod_base = OTHER; note = guanosine
  modified_base 19: mod_base = OTHER; note = adenosine
  modified_base 20: mod_base = OTHER; note = 2'-deoxythymidine
  modified_base 21: mod_base = OTHER; note = 2'-deoxythymidine
  source 1..21: mol_type = other RNA
agaatcattttgtggacgatt

SEQ ID NO: 1078 - RNA, 21 nt, synthetic construct
  modified_base 20..21: mod_base = OTHER; note = thymine
  modified_base 1: mod_base = OTHER; note = guanosine
  modified_base 2: mod_base = OTHER; note = adenosine
  modified_base 3: mod_base = OTHER; note = adenosine
  modified_base 4: mod_base = um
  modified_base 5: mod_base = cm
  modified_base 6: mod_base = OTHER; note = adenosine
  modified_base 7: mod_base = um
  modified_base 8: mod_base = um
  modified_base 9: mod_base = um
  modified_base 10: mod_base = um
  modified_base 11: mod_base = OTHER; note = guanosine
  modified_base 12: mod_base = um
  modified_base 13: mod_base = OTHER; note = guanosine
  modified_base 14: mod_base = OTHER; note = guanosine
  modified_base 15: mod_base = OTHER; note = adenosine
  modified_base 16: mod_base = cm
  modified_base 17: mod_base = OTHER; note = guanosine
  modified_base 18: mod_base = OTHER; note = adenosine
  modified_base 19: mod_base = OTHER; note = adenosine
  modified_base 20: mod_base = OTHER; note = 2'-deoxythymidine
  modified_base 21: mod_base = OTHER; note = 2'-deoxythymidine
  source 1..21: mol_type = other RNA
gaatcattttgtggacgaatt

SEQ ID NO: 1079 - RNA, 21 nt, synthetic construct
  modified_base 20..21: mod_base = OTHER; note = thymine
  modified_base 1: mod_base = OTHER; note = adenosine
  modified_base 2: mod_base = OTHER; note = adenosine
  modified_base 3: mod_base = um
  modified_base 4: mod_base = cm
  modified_base 5: mod_base = OTHER; note = adenosine
  modified_base 6: mod_base = um
  modified_base 7: mod_base = um
  modified_base 8: mod_base = um
  modified_base 9: mod_base = um
  modified_base 10: mod_base = OTHER; note = guanosine
  modified_base 11: mod_base = um
  modified_base 12: mod_base = OTHER; note = guanosine
  modified_base 13: mod_base = OTHER; note = guanosine
  modified_base 14: mod_base = OTHER; note = adenosine
  modified_base 15: mod_base = cm
  modified_base 16: mod_base = OTHER; note = guanosine
  modified_base 17: mod_base = OTHER; note = adenosine
  modified_base 18: mod_base = OTHER; note = adenosine
  modified_base 19: mod_base = um
  modified_base 20: mod_base = OTHER; note = 2'-deoxythymidine
  modified_base 21: mod_base = OTHER; note = 2'-deoxythymidine
  source 1..21: mol_type = other RNA
aatcattttgtggacgaattt

SEQ ID NO: 1080 - RNA, 21 nt, synthetic construct
  modified_base 20..21: mod_base = OTHER; note = thymine
  modified_base 1: mod_base = OTHER; note = adenosine
  modified_base 2: mod_base = um
  modified_base 3: mod_base = cm
  modified_base 4: mod_base = OTHER; note = adenosine
  modified_base 5: mod_base = um
  modified_base 6: mod_base = um
  modified_base 7: mod_base = um
  modified_base 8: mod_base = um
  modified_base 9: mod_base = OTHER; note = guanosine
  modified_base 10: mod_base = um
  modified_base 11: mod_base = OTHER; note = guanosine
  modified_base 12: mod_base = OTHER; note = guanosine
  modified_base 13: mod_base = OTHER; note = adenosine
  modified_base 14: mod_base = cm
  modified_base 15: mod_base = OTHER; note = guanosine
  modified_base 16: mod_base = OTHER; note = adenosine
  modified_base 17: mod_base = OTHER; note = adenosine
  modified_base 18: mod_base = um
  modified_base 19: mod_base = OTHER; note = adenosine
  modified_base 20: mod_base = OTHER; note = 2'-deoxythymidine
  modified_base 21: mod_base = OTHER; note = 2'-deoxythymidine
  source 1..21: mol_type = other RNA
atcattttgtggacgaatatt

SEQ ID NO: 1081 - RNA, 21 nt, synthetic construct
  modified_base 20..21: mod_base = OTHER; note = thymine
  modified_base 1: mod_base = um
  modified_base 2: mod_base = cm
  modified_base 3: mod_base = OTHER; note = adenosine
  modified_base 4: mod_base = um
  modified_base 5: mod_base = um
  modified_base 6: mod_base = um
  modified_base 7: mod_base = um
  modified_base 8: mod_base = OTHER; note = guanosine
  modified_base 9: mod_base = um
  modified_base 10: mod_base = OTHER; note = guanosine
  modified_base 11: mod_base = OTHER; note = guanosine
  modified_base 12: mod_base = OTHER; note = adenosine
  modified_base 13: mod_base = cm
  modified_base 14: mod_base = OTHER; note = guanosine
  modified_base 15: mod_base = OTHER; note = adenosine
  modified_base 16: mod_base = OTHER; note = adenosine
  modified_base 17: mod_base = um
  modified_base 18: mod_base = OTHER; note = adenosine
  modified_base 19: mod_base = um
  modified_base 20: mod_base = OTHER; note = 2'-deoxythymidine
  modified_base 21: mod_base = OTHER; note = 2'-deoxythymidine
  source 1..21: mol_type = other RNA
tcattttgtggacgaatattt

SEQ ID NO: 1082 - RNA, 21 nt, synthetic construct
  modified_base 20..21: mod_base = OTHER; note = thymine
  modified_base 1: mod_base = cm
  modified_base 2: mod_base = OTHER; note = adenosine
  modified_base 3: mod_base = um
  modified_base 4: mod_base = um
  modified_base 5: mod_base = um
  modified_base 6: mod_base = um
  modified_base 7: mod_base = OTHER; note = guanosine
  modified_base 8: mod_base = um
  modified_base 9: mod_base = OTHER; note = guanosine
  modified_base 10: mod_base = OTHER; note = guanosine
  modified_base 11: mod_base = OTHER; note = adenosine
  modified_base 12: mod_base = cm
  modified_base 13: mod_base = OTHER; note = guanosine
  modified_base 14: mod_base = OTHER; note = adenosine
  modified_base 15: mod_base = OTHER; note = adenosine
  modified_base 16: mod_base = um
  modified_base 17: mod_base = OTHER; note = adenosine
  modified_base 18: mod_base = um
  modified_base 19: mod_base = OTHER; note = guanosine
  modified_base 20: mod_base = OTHER; note = 2'-deoxythymidine
  modified_base 21: mod_base = OTHER; note = 2'-deoxythymidine
  source 1..21: mol_type = other RNA
cattttgtggacgaatatgtt

SEQ ID NO: 1083 - RNA, 21 nt, synthetic construct
  modified_base 20..21: mod_base = OTHER; note = thymine
  modified_base 1: mod_base = OTHER; note = adenosine
  modified_base 2: mod_base = um
  modified_base 3: mod_base = um
  modified_base 4: mod_base = um
  modified_base 5: mod_base = um
  modified_base 6: mod_base = OTHER; note = guanosine
  modified_base 7: mod_base = um
  modified_base 8: mod_base = OTHER; note = guanosine
  modified_base 9: mod_base = OTHER; note = guanosine
  modified_base 10: mod_base = OTHER; note = adenosine
  modified_base 11: mod_base = cm
  modified_base 12: mod_base = OTHER; note = guanosine
  modified_base 13: mod_base = OTHER; note = adenosine
  modified_base 14: mod_base = OTHER; note = adenosine
  modified_base 15: mod_base = um
  modified_base 16: mod_base = OTHER; note = adenosine
  modified_base 17: mod_base = um
  modified_base 18: mod_base = OTHER; note = guanosine
  modified_base 19: mod_base = OTHER; note = adenosine
  modified_base 20: mod_base = OTHER; note = 2'-deoxythymidine
  modified_base 21: mod_base = OTHER; note = 2'-deoxythymidine
  source 1..21: mol_type = other RNA
attttgtggacgaatatgatt

SEQ ID NO: 1084 - RNA, 21 nt, synthetic construct
  modified_base 20..21: mod_base = OTHER; note = thymine
  modified_base 1: mod_base = um
  modified_base 2: mod_base = um
  modified_base 3: mod_base = um
  modified_base 4: mod_base = um
  modified_base 5: mod_base = OTHER; note = guanosine
  modified_base 6: mod_base = um
  modified_base 7: mod_base = OTHER; note = guanosine
  modified_base 8: mod_base = OTHER; note = guanosine
  modified_base 9: mod_base = OTHER; note = adenosine
  modified_base 10: mod_base = cm
  modified_base 11: mod_base = OTHER; note = guanosine
  modified_base 12: mod_base = OTHER; note = adenosine
  modified_base 13: mod_base = OTHER; note = adenosine
  modified_base 14: mod_base = um
  modified_base 15: mod_base = OTHER; note = adenosine
  modified_base 16: mod_base = um
  modified_base 17: mod_base = OTHER; note = guanosine
  modified_base 18: mod_base = OTHER; note = adenosine
  modified_base 19: mod_base = um
  modified_base 20: mod_base = OTHER; note = 2'-deoxythymidine
  modified_base 21: mod_base = OTHER; note = 2'-deoxythymidine
  source 1..21: mol_type = other RNA
ttttgtggacgaatatgattt

SEQ ID NO: 1085 - RNA, 21 nt, synthetic construct
  modified_base 20..21: mod_base = OTHER; note = thymine
  modified_base 1: mod_base = um
  modified_base 2: mod_base = um
  modified_base 3: mod_base = um
  modified_base 4: mod_base = OTHER; note = guanosine
  modified_base 5: mod_base = um
  modified_base 6: mod_base = OTHER; note = guanosine
  modified_base 7: mod_base = OTHER; note = guanosine
  modified_base 8: mod_base = OTHER; note = adenosine
  modified_base 9: mod_base = cm
  modified_base 10: mod_base = OTHER; note = guanosine
  modified_base 11: mod_base = OTHER; note = adenosine
  modified_base 12: mod_base = OTHER; note = adenosine
  modified_base 13: mod_base = um
  modified_base 14: mod_base = OTHER; note = adenosine
  modified_base 15: mod_base = um
  modified_base 16: mod_base = OTHER; note = guanosine
  modified_base 17: mod_base = OTHER; note = adenosine
  modified_base 18: mod_base = um
  modified_base 19: mod_base = cm
  modified_base 20: mod_base = OTHER; note = 2'-deoxythymidine
  modified_base 21: mod_base = OTHER; note = 2'-deoxythymidine
  source 1..21: mol_type = other RNA
tttgtggacgaatatgatctt

SEQ ID NO: 1086 - RNA, 21 nt, synthetic construct
  modified_base 20..21: mod_base = OTHER; note = thymine
  modified_base 1: mod_base = um
  modified_base 2: mod_base = um
  modified_base 3: mod_base = OTHER; note = guanosine
  modified_base 4: mod_base = um
  modified_base 5: mod_base = OTHER; note = guanosine
  modified_base 6: mod_base = OTHER; note = guanosine
  modified_base 7: mod_base = OTHER; note = adenosine
  modified_base 8: mod_base = cm
  modified_base 9: mod_base = OTHER; note = guanosine
  modified_base 10: mod_base = OTHER; note = adenosine
  modified_base 11: mod_base = OTHER; note = adenosine
  modified_base 12: mod_base = um
  modified_base 13: mod_base = OTHER; note = adenosine
  modified_base 14: mod_base = um
  modified_base 15: mod_base = OTHER; note = guanosine
  modified_base 16: mod_base = OTHER; note = adenosine
  modified_base 17: mod_base = um
  modified_base 18: mod_base = cm
  modified_base 19: mod_base = cm
  modified_base 20: mod_base = OTHER; note = 2'-deoxythymidine
  modified_base 21: mod_base = OTHER; note = 2'-deoxythymidine
  source 1..21: mol_type = other RNA
ttgtggacgaatatgatcctt

SEQ ID NO: 1087 - RNA, 21 nt, synthetic construct
  modified_base 20..21: mod_base = OTHER; note = thymine
  modified_base 1: mod_base = um
  modified_base 2: mod_base = OTHER; note = guanosine
  modified_base 3: mod_base = um
  modified_base 4: mod_base = OTHER; note = guanosine
  modified_base 5: mod_base = OTHER; note = guanosine
  modified_base 6: mod_base = OTHER; note = adenosine
  modified_base 7: mod_base = cm
  modified_base 8: mod_base = OTHER; note = guanosine
  modified_base 9: mod_base = OTHER; note = adenosine
  modified_base 10: mod_base = OTHER; note = adenosine
  modified_base 11: mod_base = um
  modified_base 12: mod_base = OTHER; note = adenosine
  modified_base 13: mod_base = um
  modified_base 14: mod_base = OTHER; note = guanosine
  modified_base 15: mod_base = OTHER; note = adenosine
  modified_base 16: mod_base = um
  modified_base 17: mod_base = cm
  modified_base 18: mod_base = cm
  modified_base 19: mod_base = OTHER; note = adenosine
  modified_base 20: mod_base = OTHER; note = 2'-deoxythymidine
  modified_base 21: mod_base = OTHER; note = 2'-deoxythymidine
  source 1..21: mol_type = other RNA
tgtggacgaatatgatccatt

SEQ ID NO: 1088 - RNA, 21 nt, synthetic construct
  modified_base 20..21: mod_base = OTHER; note = thymine
  modified_base 1: mod_base = OTHER; note = guanosine
  modified_base 2: mod_base = um
  modified_base 3: mod_base = OTHER; note = guanosine
  modified_base 4: mod_base = OTHER; note = guanosine
  modified_base 5: mod_base = OTHER; note = adenosine
  modified_base 6: mod_base = cm
  modified_base 7: mod_base = OTHER; note = guanosine
  modified_base 8: mod_base = OTHER; note = adenosine
  modified_base 9: mod_base = OTHER; note = adenosine
  modified_base 10: mod_base = um
  modified_base 11: mod_base = OTHER; note = adenosine
  modified_base 12: mod_base = um
  modified_base 13: mod_base = OTHER; note = guanosine
  modified_base 14: mod_base = OTHER; note = adenosine
  modified_base 15: mod_base = um
  modified_base 16: mod_base = cm
  modified_base 17: mod_base = cm
  modified_base 18: mod_base = OTHER; note = adenosine
  modified_base 19: mod_base = OTHER; note = adenosine
  modified_base 20: mod_base = OTHER; note = 2'-deoxythymidine
  modified_base 21: mod_base = OTHER; note = 2'-deoxythymidine
  source 1..21: mol_type = other RNA
gtggacgaatatgatccaatt

SEQ ID NO: 1089 - RNA, 21 nt, synthetic construct
  modified_base 20..21: mod_base = OTHER; note = thymine
  modified_base 1: mod_base = um
  modified_base 2: mod_base = OTHER; note = guanosine
  modified_base 3: mod_base = OTHER; note = guanosine
  modified_base 4: mod_base = OTHER; note = adenosine
  modified_base 5: mod_base = cm
  modified_base 6: mod_base = OTHER; note = guanosine
  modified_base 7: mod_base = OTHER; note = adenosine
  modified_base 8: mod_base = OTHER; note = adenosine
  modified_base 9: mod_base = um
  modified_base 10: mod_base = OTHER; note = adenosine
  modified_base 11: mod_base = um
  modified_base 12: mod_base = OTHER; note = guanosine
  modified_base 13: mod_base = OTHER; note = adenosine
  modified_base 14: mod_base = um
  modified_base 15: mod_base = cm
  modified_base 16: mod_base = cm
  modified_base 17: mod_base = OTHER; note = adenosine
  modified_base 18: mod_base = OTHER; note = adenosine
  modified_base 19: mod_base = cm
  modified_base 20: mod_base = OTHER; note = 2'-deoxythymidine
  modified_base 21: mod_base = OTHER; note = 2'-deoxythymidine
  source 1..21: mol_type = other RNA
tggacgaatatgatccaactt

SEQ ID NO: 1090 - RNA, 21 nt, synthetic construct
  modified_base 20..21: mod_base = OTHER; note = thymine
  modified_base 1: mod_base = OTHER; note = adenosine
  modified_base 2: mod_base = OTHER; note = guanosine
  modified_base 3: mod_base = OTHER; note = guanosine
  modified_base 4: mod_base = OTHER; note = adenosine
  modified_base 5: mod_base = OTHER; note = adenosine
  modified_base 6: mod_base = OTHER; note = guanosine
  modified_base 7: mod_base = cm
  modified_base 8: mod_base = OTHER; note = adenosine
  modified_base 9: mod_base = OTHER; note = adenosine
  modified_base 10: mod_base = OTHER; note = guanosine
  modified_base 11: mod_base = um
  modified_base 12: mod_base = OTHER; note = adenosine
  modified_base 13: mod_base = OTHER; note = guanosine
  modified_base 14: mod_base = um
  modified_base 15: mod_base = OTHER; note = adenosine
  modified_base 16: mod_base = OTHER; note = adenosine
  modified_base 17: mod_base = um
  modified_base 18: mod_base = um
  modified_base 19: mod_base = OTHER; note = guanosine
  modified_base 20: mod_base = OTHER; note = 2'-deoxythymidine
  modified_base 21: mod_base = OTHER; note = 2'-deoxythymidine
  source 1..21: mol_type = other RNA
aggaagcaagtagtaattgtt

SEQ ID NO: 1091 - RNA, 21 nt, synthetic construct
  modified_base 20..21: mod_base = OTHER; note = thymine
  modified_base 1: mod_base = OTHER; note = guanosine
  modified_base 2: mod_base = OTHER; note = guanosine
  modified_base 3: mod_base = OTHER; note = adenosine
  modified_base 4: mod_base = OTHER; note = adenosine
  modified_base 5: mod_base = OTHER; note = guanosine
  modified_base 6: mod_base = cm
  modified_base 7: mod_base = OTHER; note = adenosine
  modified_base 8: mod_base = OTHER; note = adenosine
  modified_base 9: mod_base = OTHER; note = guanosine
  modified_base 10: mod_base = um
  modified_base 11: mod_base = OTHER; note = adenosine
  modified_base 12: mod_base = OTHER; note = guanosine
  modified_base 13: mod_base = um
  modified_base 14: mod_base = OTHER; note = adenosine
  modified_base 15: mod_base = OTHER; note = adenosine
  modified_base 16: mod_base = um
  modified_base 17: mod_base = um
  modified_base 18: mod_base = OTHER; note = guanosine
  modified_base 19: mod_base = OTHER; note = adenosine
  modified_base 20: mod_base = OTHER; note = 2'-deoxythymidine
  modified_base 21: mod_base = OTHER; note = 2'-deoxythymidine
  source 1..21: mol_type = other RNA
ggaagcaagtagtaattgatt

SEQ ID NO: 1092 - RNA, 21 nt, synthetic construct
  modified_base 20..21: mod_base = OTHER; note = thymine
  modified_base 1: mod_base = OTHER; note = guanosine
  modified_base 2: mod_base = OTHER; note = adenosine
  modified_base 3: mod_base = OTHER; note = adenosine
  modified_base 4: mod_base = OTHER; note = guanosine
  modified_base 5: mod_base = cm
  modified_base 6: mod_base = OTHER; note = adenosine
  modified_base 7: mod_base = OTHER; note = adenosine
  modified_base 8: mod_base = OTHER; note = guanosine
  modified_base 9: mod_base = um
  modified_base 10: mod_base = OTHER; note = adenosine
  modified_base 11: mod_base = OTHER; note = guanosine
  modified_base 12: mod_base = um
  modified_base 13: mod_base = OTHER; note = adenosine
  modified_base 14: mod_base = OTHER; note = adenosine
  modified_base 15: mod_base = um
  modified_base 16: mod_base = um
  modified_base 17: mod_base = OTHER; note = guanosine
  modified_base 18: mod_base = OTHER; note = adenosine
  modified_base 19: mod_base = um
  modified_base 20: mod_base = OTHER; note = 2'-deoxythymidine
  modified_base 21: mod_base = OTHER; note = 2'-deoxythymidine
  source 1..21: mol_type = other RNA
gaagcaagtagtaattgattt

SEQ ID NO: 1093 - RNA, 21 nt, synthetic construct
  modified_base 20..21: mod_base = OTHER; note = thymine
  modified_base 1: mod_base = OTHER; note = adenosine
  modified_base 2: mod_base = OTHER; note = adenosine
  modified_base 3: mod_base = OTHER; note = guanosine
  modified_base 4: mod_base = cm
  modified_base 5: mod_base = OTHER; note = adenosine
  modified_base 6: mod_base = OTHER; note = adenosine
  modified_base 7: mod_base = OTHER; note = guanosine
  modified_base 8: mod_base = um
  modified_base 9: mod_base = OTHER; note = adenosine
  modified_base 10: mod_base = OTHER; note = guanosine
  modified_base 11: mod_base = um
  modified_base 12: mod_base = OTHER; note = adenosine
  modified_base 13: mod_base = OTHER; note = adenosine
  modified_base 14: mod_base = um
  modified_base 15: mod_base = um
  modified_base 16: mod_base = OTHER; note = guanosine
  modified_base 17: mod_base = OTHER; note = adenosine
  modified_base 18: mod_base = um
  modified_base 19: mod_base = OTHER; note = guanosine
  modified_base 20: mod_base = OTHER; note = 2'-deoxythymidine
  modified_base 21: mod_base = OTHER; note = 2'-deoxythymidine
  source 1..21: mol_type = other RNA
aagcaagtagtaattgatgtt

SEQ ID NO: 1094 - RNA, 21 nt, synthetic construct
  modified_base 20..21: mod_base = OTHER; note = thymine
  modified_base 1: mod_base = OTHER; note = adenosine
  modified_base 2: mod_base = OTHER; note = guanosine
  modified_base 3: mod_base = cm
  modified_base 4: mod_base = OTHER; note = adenosine
  modified_base 5: mod_base = OTHER; note = adenosine
  modified_base 6: mod_base = OTHER; note = guanosine
  modified_base 7: mod_base = um
  modified_base 8: mod_base = OTHER; note = adenosine
  modified_base 9: mod_base = OTHER; note = guanosine
  modified_base 10: mod_base = um
  modified_base 11: mod_base = OTHER; note = adenosine
  modified_base 12: mod_base = OTHER; note = adenosine
  modified_base 13: mod_base = um
  modified_base 14: mod_base = um
  modified_base 15: mod_base = OTHER; note = guanosine
  modified_base 16: mod_base = OTHER; note = adenosine
  modified_base 17: mod_base = um
  modified_base 18: mod_base = OTHER; note = guanosine
  modified_base 19: mod_base = OTHER; note = guanosine
  modified_base 20: mod_base = OTHER; note = 2'-deoxythymidine
  modified_base 21: mod_base = OTHER; note = 2'-deoxythymidine
  source 1..21: mol_type = other RNA
agcaagtagtaattgatggtt

SEQ ID NO: 1095 - RNA, 21 nt, synthetic construct
  modified_base 20..21: mod_base = OTHER; note = thymine
  modified_base 1: mod_base = OTHER; note = guanosine
  modified_base 2: mod_base = cm
  modified_base 3: mod_base = OTHER; note = adenosine
  modified_base 4: mod_base = OTHER; note = adenosine
  modified_base 5: mod_base = OTHER; note = guanosine
  modified_base 6: mod_base = um
  modified_base 7: mod_base = OTHER; note = adenosine
  modified_base 8: mod_base = OTHER; note = guanosine
  modified_base 9: mod_base = um
  modified_base 10: mod_base = OTHER; note = adenosine
  modified_base 11: mod_base = OTHER; note = adenosine
  modified_base 12: mod_base = um
  modified_base 13: mod_base = um
  modified_base 14: mod_base = OTHER; note = guanosine
  modified_base 15: mod_base = OTHER; note = adenosine
  modified_base 16: mod_base = um
  modified_base 17: mod_base = OTHER; note = guanosine
  modified_base 18: mod_base = OTHER; note = guanosine
  modified_base 19: mod_base = OTHER; note = adenosine
  modified_base 20: mod_base = OTHER; note = 2'-deoxythymidine
  modified_base 21: mod_base = OTHER; note = 2'-deoxythymidine
  source 1..21: mol_type = other RNA
gcaagtagtaattgatggatt

SEQ ID NO: 1096 - RNA, 21 nt, synthetic construct
  modified_base 20..21: mod_base = OTHER; note = thymine
  modified_base 1: mod_base = cm
  modified_base 2: mod_base = OTHER; note = adenosine
  modified_base 3: mod_base = OTHER; note = adenosine
  modified_base 4: mod_base = OTHER; note = guanosine
  modified_base 5: mod_base = um
  modified_base 6: mod_base = OTHER; note = adenosine
  modified_base 7: mod_base = OTHER; note = guanosine
  modified_base 8: mod_base = um
  modified_base 9: mod_base = OTHER; note = adenosine
  modified_base 10: mod_base = OTHER; note = adenosine
  modified_base 11: mod_base = um
  modified_base 12: mod_base = um
  modified_base 13: mod_base = OTHER; note = guanosine
  modified_base 14: mod_base = OTHER; note = adenosine
  modified_base 15: mod_base = um
  modified_base 16: mod_base = OTHER; note = guanosine
  modified_base 17: mod_base = OTHER; note = guanosine
  modified_base 18: mod_base = OTHER; note = adenosine
  modified_base 19: mod_base = OTHER; note = guanosine
  modified_base 20: mod_base = OTHER; note = 2'-deoxythymidine
  modified_base 21: mod_base = OTHER; note = 2'-deoxythymidine
  source 1..21: mol_type = other RNA
caagtagtaattgatggagtt

SEQ ID NO: 1097 - RNA, 21 nt, synthetic construct
  modified_base 20..21: mod_base = OTHER; note = thymine
  modified_base 1: mod_base = OTHER; note = adenosine
  modified_base 2: mod_base = OTHER; note = adenosine
  modified_base 3: mod_base = OTHER; note = guanosine
  modified_base 4: mod_base = um
  modified_base 5: mod_base = OTHER; note = adenosine
  modified_base 6: mod_base = OTHER; note = guanosine
  modified_base 7: mod_base = um
  modified_base 8: mod_base = OTHER; note = adenosine
  modified_base 9: mod_base = OTHER; note = adenosine
  modified_base 10: mod_base = um
  modified_base 11: mod_base = um
  modified_base 12: mod_base = OTHER; note = guanosine
  modified_base 13: mod_base = OTHER; note = adenosine
  modified_base 14: mod_base = um
  modified_base 15: mod_base = OTHER; note = guanosine
  modified_base 16: mod_base = OTHER; note = guanosine
  modified_base 17: mod_base = OTHER; note = adenosine
  modified_base 18: mod_base = OTHER; note = guanosine
  modified_base 19: mod_base = OTHER; note = adenosine
  modified_base 20: mod_base = OTHER; note = 2'-deoxythymidine
  modified_base 21: mod_base = OTHER; note = 2'-deoxythymidine
  source 1..21: mol_type = other RNA
aagtagtaattgatggagatt

SEQ ID NO: 1098 - RNA, 21 nt, synthetic construct
  modified_base 20..21: mod_base = OTHER; note = thymine
  modified_base 1: mod_base = OTHER; note = adenosine
  modified_base 2: mod_base = OTHER; note = guanosine
  modified_base 3: mod_base = um
  modified_base 4: mod_base = OTHER; note = adenosine
  modified_base 5: mod_base = OTHER; note = guanosine
  modified_base 6: mod_base = um
  modified_base 7: mod_base = OTHER; note = adenosine
  modified_base 8: mod_base = OTHER; note = adenosine
  modified_base 9: mod_base = um
  modified_base 10: mod_base = um
  modified_base 11: mod_base = OTHER; note = guanosine
  modified_base 12: mod_base = OTHER; note = adenosine
  modified_base 13: mod_base = um
  modified_base 14: mod_base = OTHER; note = guanosine
  modified_base 15: mod_base = OTHER; note = guanosine
  modified_base 16: mod_base = OTHER; note = adenosine
  modified_base 17: mod_base = OTHER; note = guanosine
  modified_base 18: mod_base = OTHER; note = adenosine
  modified_base 19: mod_base = OTHER; note = adenosine
  modified_base 20: mod_base = OTHER; note = 2'-deoxythymidine
  modified_base 21: mod_base = OTHER; note = 2'-deoxythymidine
  source 1..21: mol_type = other RNA
agtagtaattgatggagaatt

SEQ ID NO: 1099 - RNA, 21 nt, synthetic construct
  modified_base 20..21: mod_base = OTHER; note = thymine
  modified_base 1: mod_base = OTHER; note = guanosine
  modified_base 2: mod_base = um
  modified_base 3: mod_base = OTHER; note = adenosine
  modified_base 4: mod_base = OTHER; note = guanosine
  modified_base 5: mod_base = um
  modified_base 6: mod_base = OTHER; note = adenosine
  modified_base 7: mod_base = OTHER; note = adenosine
  modified_base 8: mod_base = um
  modified_base 9: mod_base = um
  modified_base 10: mod_base = OTHER; note = guanosine
  modified_base 11: mod_base = OTHER; note = adenosine
  modified_base 12: mod_base = um
  modified_base 13: mod_base = OTHER; note = guanosine
  modified_base 14: mod_base = OTHER; note = guanosine
  modified_base 15: mod_base = OTHER; note = adenosine
  modified_base 16: mod_base = OTHER; note = guanosine
  modified_base 17: mod_base = OTHER; note = adenosine
  modified_base 18: mod_base = OTHER; note = adenosine
  modified_base 19: mod_base = OTHER; note = adenosine
  modified_base 20: mod_base = OTHER; note = 2'-deoxythymidine
  modified_base 21: mod_base = OTHER; note = 2'-deoxythymidine
  source 1..21: mol_type = other RNA
gtagtaattgatggagaaatt

SEQ ID NO: 1100 - RNA, 21 nt, synthetic construct
  modified_base 20..21: mod_base = OTHER; note = thymine
  modified_base 1: mod_base = um
  modified_base 2: mod_base = OTHER; note = adenosine
  modified_base 3: mod_base = OTHER; note = guanosine
  modified_base 4: mod_base = um
  modified_base 5: mod_base = OTHER; note = adenosine
  modified_base 6: mod_base = OTHER; note = adenosine
  modified_base 7: mod_base = um
  modified_base 8: mod_base = um
  modified_base 9: mod_base = OTHER; note = guanosine
  modified_base 10: mod_base = OTHER; note = adenosine
  modified_base 11: mod_base = um
  modified_base 12: mod_base = OTHER; note = guanosine
  modified_base 13: mod_base = OTHER; note = guanosine
  modified_base 14: mod_base = OTHER; note = adenosine
  modified_base 15: mod_base = OTHER; note = guanosine
  modified_base 16: mod_base = OTHER; note = adenosine
  modified_base 17: mod_base = OTHER; note = adenosine
  modified_base 18: mod_base = OTHER; note = adenosine
  modified_base 19: mod_base = cm
  modified_base 20: mod_base = OTHER; note = 2'-deoxythymidine
  modified_base 21: mod_base = OTHER; note = 2'-deoxythymidine
  source 1..21: mol_type = other RNA
tagtaattgatggagaaactt

SEQ ID NO: 1101 - RNA, 21 nt, synthetic construct
  modified_base 20..21: mod_base = OTHER; note = thymine
  modified_base 1: mod_base = OTHER; note = adenosine
  modified_base 2: mod_base = OTHER; note = guanosine
  modified_base 3: mod_base = um
  modified_base 4: mod_base = OTHER; note = adenosine
  modified_base 5: mod_base = OTHER; note = adenosine
  modified_base 6: mod_base = um
  modified_base 7: mod_base = um
  modified_base 8: mod_base = OTHER; note = guanosine
  modified_base 9: mod_base = OTHER; note = adenosine
  modified_base 10: mod_base = um
  modified_base 11: mod_base = OTHER; note = guanosine
  modified_base 12: mod_base = OTHER; note = guanosine
  modified_base 13: mod_base = OTHER; note = adenosine
  modified_base 14: mod_base = OTHER; note = guanosine
  modified_base 15: mod_base = OTHER; note = adenosine
  modified_base 16: mod_base = OTHER; note = adenosine
  modified_base 17: mod_base = OTHER; note = adenosine
  modified_base 18: mod_base = cm
  modified_base 19: mod_base = cm
  modified_base 20: mod_base = OTHER; note = 2'-deoxythymidine
  modified_base 21: mod_base = OTHER; note = 2'-deoxythymidine
  source 1..21: mol_type = other RNA
agtaattgatggagaaacctt

SEQ ID NO: 1102 - RNA, 21 nt, synthetic construct
  modified_base 20..21: mod_base = OTHER; note = thymine
  modified_base 1: mod_base = OTHER; note = guanosine
  modified_base 2: mod_base = um
  modified_base 3: mod_base = OTHER; note = adenosine
  modified_base 4: mod_base = OTHER; note = adenosine
  modified_base 5: mod_base = um
  modified_base 6: mod_base = um
  modified_base 7: mod_base = OTHER; note = guanosine
  modified_base 8: mod_base = OTHER; note = adenosine
  modified_base 9: mod_base = um
  modified_base 10: mod_base = OTHER; note = guanosine
  modified_base 11: mod_base = OTHER; note = guanosine
  modified_base 12: mod_base = OTHER; note = adenosine
  modified_base 13: mod_base = OTHER; note = guanosine
  modified_base 14: mod_base = OTHER; note = adenosine
  modified_base 15: mod_base = OTHER; note = adenosine
  modified_base 16: mod_base = OTHER; note = adenosine
  modified_base 17: mod_base = cm
  modified_base 18: mod_base = cm
  modified_base 19: mod_base = um
  modified_base 20: mod_base = OTHER; note = 2'-deoxythymidine
  modified_base 21: mod_base = OTHER; note = 2'-deoxythymidine
  source 1..21: mol_type = other RNA
gtaattgatggagaaaccttt

SEQ ID NO: 1103 - RNA, 21 nt, synthetic construct
  modified_base 20..21: mod_base = OTHER; note = thymine
  modified_base 1: mod_base = um
  modified_base 2: mod_base = OTHER; note = adenosine
  modified_base 3: mod_base = OTHER; note = adenosine
  modified_base 4: mod_base = um
  modified_base 5: mod_base = um
  modified_base 6: mod_base = OTHER; note = guanosine
  modified_base 7: mod_base = OTHER; note = adenosine
  modified_base 8: mod_base = um
  modified_base 9: mod_base = OTHER; note = guanosine
  modified_base 10: mod_base = OTHER; note = guanosine
  modified_base 11: mod_base = OTHER; note = adenosine
  modified_base 12: mod_base = OTHER; note = guanosine
  modified_base 13: mod_base = OTHER; note = adenosine
  modified_base 14: mod_base = OTHER; note = adenosine
  modified_base 15: mod_base = OTHER; note = adenosine
  modified_base 16: mod_base = cm
  modified_base 17: mod_base = cm
  modified_base 18: mod_base = um
  modified_base 19: mod_base = OTHER; note = guanosine
  modified_base 20: mod_base = OTHER; note = 2'-deoxythymidine
  modified_base 21: mod_base = OTHER; note = 2'-deoxythymidine
  source 1..21: mol_type = other RNA
taattgatggagaaacctgtt

SEQ ID NO: 1104 - RNA, 21 nt, synthetic construct
  modified_base 20..21: mod_base = OTHER; note = thymine
  modified_base 1: mod_base = OTHER; note = adenosine
  modified_base 2: mod_base = OTHER; note = adenosine
  modified_base 3: mod_base = um
  modified_base 4: mod_base = um
  modified_base 5: mod_base = OTHER; note = guanosine
  modified_base 6: mod_base = OTHER; note = adenosine
  modified_base 7: mod_base = um
  modified_base 8: mod_base = OTHER; note = guanosine
  modified_base 9: mod_base = OTHER; note = guanosine
  modified_base 10: mod_base = OTHER; note = adenosine
  modified_base 11: mod_base = OTHER; note = guanosine
  modified_base 12: mod_base = OTHER; note = adenosine
  modified_base 13: mod_base = OTHER; note = adenosine
  modified_base 14: mod_base = OTHER; note = adenosine
  modified_base 15: mod_base = cm
  modified_base 16: mod_base = cm
  modified_base 17: mod_base = um
  modified_base 18: mod_base = OTHER; note = guanosine
  modified_base 19: mod_base = um
  modified_base 20: mod_base = OTHER; note = 2'-deoxythymidine
  modified_base 21: mod_base = OTHER; note = 2'-deoxythymidine
  source 1..21: mol_type = other RNA
aattgatggagaaacctgttt

SEQ ID NO: 1105 - RNA, 21 nt, synthetic construct
  modified_base 20..21: mod_base = OTHER; note = thymine
  modified_base 1: mod_base = OTHER; note = adenosine
  modified_base 2: mod_base = um
  modified_base 3: mod_base = um
  modified_base 4: mod_base = OTHER; note = guanosine
  modified_base 5: mod_base = OTHER; note = adenosine
  modified_base 6: mod_base = um
  modified_base 7: mod_base = OTHER; note = guanosine
  modified_base 8: mod_base = OTHER; note = guanosine
  modified_base 9: mod_base = OTHER; note = adenosine
  modified_base 10: mod_base = OTHER; note = guanosine
  modified_base 11: mod_base = OTHER; note = adenosine
  modified_base 12: mod_base = OTHER; note = adenosine
  modified_base 13: mod_base = OTHER; note = adenosine
  modified_base 14: mod_base = cm
  modified_base 15: mod_base = cm
  modified_base 16: mod_base = um
  modified_base 17: mod_base = OTHER; note = guanosine
  modified_base 18: mod_base = um
  modified_base 19: mod_base = cm
  modified_base 20: mod_base = OTHER; note = 2'-deoxythymidine
  modified_base 21: mod_base = OTHER; note = 2'-deoxythymidine
  source 1..21: mol_type = other RNA
attgatggagaaacctgtctt

SEQ ID NO: 1106 - RNA, 21 nt, synthetic construct
  modified_base 20..21: mod_base = OTHER; note = thymine
  modified_base 1: mod_base = um
  modified_base 2: mod_base = um
  modified_base 3: mod_base = OTHER; note = guanosine
  modified_base 4: mod_base = OTHER; note = adenosine
  modified_base 5: mod_base = um
  modified_base 6: mod_base = OTHER; note = guanosine
  modified_base 7: mod_base = OTHER; note = guanosine
  modified_base 8: mod_base = OTHER; note = adenosine
  modified_base 9: mod_base = OTHER; note = guanosine
  modified_base 10: mod_base = OTHER; note = adenosine
  modified_base 11: mod_base = OTHER; note = adenosine
  modified_base 12: mod_base = OTHER; note = adenosine
  modified_base 13: mod_base = cm
  modified_base 14: mod_base = cm
  modified_base 15: mod_base = um
  modified_base 16: mod_base = OTHER; note = guanosine
  modified_base 17: mod_base = um
  modified_base 18: mod_base = cm
  modified_base 19: mod_base = um
  modified_base 20: mod_base = OTHER; note = 2'-deoxythymidine
  modified_base 21: mod_base = OTHER; note = 2'-deoxythymidine
  source 1..21: mol_type = other RNA
ttgatggagaaacctgtcttt

SEQ ID NO: 1107 - RNA, 21 nt, synthetic construct
  modified_base 20..21: mod_base = OTHER; note = thymine
  modified_base 1: mod_base = um
  modified_base 2: mod_base = OTHER; note = guanosine
  modified_base 3: mod_base = OTHER; note = adenosine
  modified_base 4: mod_base = um
  modified_base 5: mod_base = OTHER; note = guanosine
  modified_base 6: mod_base = OTHER; note = guanosine
  modified_base 7: mod_base = OTHER; note = adenosine
  modified_base 8: mod_base = OTHER; note = guanosine
  modified_base 9: mod_base = OTHER; note = adenosine
  modified_base 10: mod_base = OTHER; note = adenosine
  modified_base 11: mod_base = OTHER; note = adenosine
  modified_base 12: mod_base = cm
  modified_base 13: mod_base = cm
  modified_base 14: mod_base = um
  modified_base 15: mod_base = OTHER; note = guanosine
  modified_base 16: mod_base = um
  modified_base 17: mod_base = cm
  modified_base 18: mod_base = um
  modified_base 19: mod_base = cm
  modified_base 20: mod_base = OTHER; note = 2'-deoxythymidine
  modified_base 21: mod_base = OTHER; note = 2'-deoxythymidine
  source 1..21: mol_type = other RNA
tgatggagaaacctgtctctt

SEQ ID NO: 1108 - RNA, 21 nt, synthetic construct
  modified_base 20..21: mod_base = OTHER; note = thymine
  modified_base 1: mod_base = OTHER; note = guanosine
  modified_base 2: mod_base = OTHER; note = adenosine
  modified_base 3: mod_base = um
  modified_base 4: mod_base = OTHER; note = guanosine
  modified_base 5: mod_base = OTHER; note = guanosine
  modified_base 6: mod_base = OTHER; note = adenosine
  modified_base 7: mod_base = OTHER; note = guanosine
  modified_base 8: mod_base = OTHER; note = adenosine
  modified_base 9: mod_base = OTHER; note = adenosine
  modified_base 10: mod_base = OTHER; note = adenosine
  modified_base 11: mod_base = cm
  modified_base 12: mod_base = cm
  modified_base 13: mod_base = um
  modified_base 14: mod_base = OTHER; note = guanosine
  modified_base 15: mod_base = um
  modified_base 16: mod_base = cm
  modified_base 17: mod_base = um
  modified_base 18: mod_base = cm
  modified_base 19: mod_base = um
  modified_base 20: mod_base = OTHER; note = 2'-deoxythymidine
  modified_base 21: mod_base = OTHER; note = 2'-deoxythymidine
  source 1..21: mol_type = other RNA
gatggagaaacctgtctcttt

SEQ ID NO: 1109 - RNA, 21 nt, synthetic construct
  modified_base 20..21: mod_base = OTHER; note = thymine
  modified_base 1: mod_base = OTHER; note = adenosine
  modified_base 2: mod_base = um
  modified_base 3: mod_base = OTHER; note = guanosine
  modified_base 4: mod_base = OTHER; note = guanosine
  modified_base 5: mod_base = OTHER; note = adenosine
  modified_base 6: mod_base = OTHER; note = guanosine
  modified_base 7: mod_base = OTHER; note = adenosine
  modified_base 8: mod_base = OTHER; note = adenosine
  modified_base 9: mod_base = OTHER; note = adenosine
  modified_base 10: mod_base = cm
  modified_base 11: mod_base = cm
  modified_base 12: mod_base = um
  modified_base 13: mod_base = OTHER; note = guanosine
  modified_base 14: mod_base = um
  modified_base 15: mod_base = cm
  modified_base 16: mod_base = um
  modified_base 17: mod_base = cm
  modified_base 18: mod_base = um
  modified_base 19: mod_base = um
  modified_base 20: mod_base = OTHER; note = 2'-deoxythymidine
  modified_base 21: mod_base = OTHER; note = 2'-deoxythymidine
  source 1..21: mol_type = other RNA
atggagaaacctgtctctttt

SEQ ID NO: 1110 - RNA, 21 nt, synthetic construct
  modified_base 20..21: mod_base = OTHER; note = thymine
  modified_base 1: mod_base = um
  modified_base 2: mod_base = OTHER; note = guanosine
  modified_base 3: mod_base = OTHER; note = guanosine
  modified_base 4: mod_base = OTHER; note = adenosine
  modified_base 5: mod_base = OTHER; note = guanosine
  modified_base 6: mod_base = OTHER; note = adenosine
  modified_base 7: mod_base = OTHER; note = adenosine
  modified_base 8: mod_base = OTHER; note = adenosine
  modified_base 9: mod_base = cm
  modified_base 10: mod_base = cm
  modified_base 11: mod_base = um
  modified_base 12: mod_base = OTHER; note = guanosine
  modified_base 13: mod_base = um
  modified_base 14: mod_base = cm
  modified_base 15: mod_base = um
  modified_base 16: mod_base = cm
  modified_base 17: mod_base = um
  modified_base 18: mod_base = um
  modified_base 19: mod_base = OTHER; note = guanosine
  modified_base 20: mod_base = OTHER; note = 2'-deoxythymidine
  modified_base 21: mod_base = OTHER; note = 2'-deoxythymidine
  source 1..21: mol_type = other RNA
tggagaaacctgtctcttgtt

SEQ ID NO: 1111 - RNA, 21 nt, synthetic construct
  modified_base 20..21: mod_base = OTHER; note = thymine
  modified_base 1: mod_base = OTHER; note = guanosine
  modified_base 2: mod_base = OTHER; note = guanosine
  modified_base 3: mod_base = OTHER; note = adenosine
  modified_base 4: mod_base = OTHER; note = guanosine
  modified_base 5: mod_base = OTHER; note = adenosine
  modified_base 6: mod_base = OTHER; note = adenosine
  modified_base 7: mod_base = OTHER; note = adenosine
  modified_base 8: mod_base = cm
  modified_base 9: mod_base = cm
  modified_base 10: mod_base = um
  modified_base 11: mod_base = OTHER; note = guanosine
  modified_base 12: mod_base = um
  modified_base 13: mod_base = cm
  modified_base 14: mod_base = um
  modified_base 15: mod_base = cm
  modified_base 16: mod_base = um
  modified_base 17: mod_base = um
  modified_base 18: mod_base = OTHER; note = guanosine
  modified_base 19: mod_base = OTHER; note = guanosine
  modified_base 20: mod_base = OTHER; note = 2'-deoxythymidine
  modified_base 21: mod_base = OTHER; note = 2'-deoxythymidine
  source 1..21: mol_type = other RNA
ggagaaacctgtctcttggtt

SEQ ID NO: 1112 - RNA, 21 nt, synthetic construct
  modified_base 20..21: mod_base = OTHER; note = thymine
  modified_base 1: mod_base = OTHER; note = guanosine
  modified_base 2: mod_base = OTHER; note = adenosine
  modified_base 3: mod_base = OTHER; note = guanosine
  modified_base 4: mod_base = OTHER; note = adenosine
  modified_base 5: mod_base = OTHER; note = adenosine
  modified_base 6: mod_base = OTHER; note = adenosine
  modified_base 7: mod_base = cm
  modified_base 8: mod_base = cm
  modified_base 9: mod_base = um
  modified_base 10: mod_base = OTHER; note = guanosine
  modified_base 11: mod_base = um
  modified_base 12: mod_base = cm
  modified_base 13: mod_base = um
  modified_base 14: mod_base = cm
  modified_base 15: mod_base = um
  modified_base 16: mod_base = um
  modified_base 17: mod_base = OTHER; note = guanosine
  modified_base 18: mod_base = OTHER; note = guanosine
  modified_base 19: mod_base = OTHER; note = adenosine
  modified_base 20: mod_base = OTHER; note = 2'-deoxythymidine
  modified_base 21: mod_base = OTHER; note = 2'-deoxythymidine
  source 1..21: mol_type = other RNA
gagaaacctgtctcttggatt

SEQ ID NO: 1113 - RNA, 21 nt, synthetic construct
  modified_base 20..21: mod_base = OTHER; note = thymine
  modified_base 1: mod_base = OTHER; note = adenosine
  modified_base 2: mod_base = OTHER; note = guanosine
  modified_base 3: mod_base = OTHER; note = adenosine
  modified_base 4: mod_base = OTHER; note = adenosine
  modified_base 5: mod_base = OTHER; note = adenosine
  modified_base 6: mod_base = cm
  modified_base 7: mod_base = cm
  modified_base 8: mod_base = um
  modified_base 9: mod_base = OTHER; note = guanosine
  modified_base 10: mod_base = um
  modified_base 11: mod_base = cm
  modified_base 12: mod_base = um
  modified_base 13: mod_base = cm
  modified_base 14: mod_base = um
  modified_base 15: mod_base = um
  modified_base 16: mod_base = OTHER; note = guanosine
  modified_base 17: mod_base = OTHER; note = guanosine
  modified_base 18: mod_base = OTHER; note = adenosine
  modified_base 19: mod_base = um
  modified_base 20: mod_base = OTHER; note = 2'-deoxythymidine
  modified_base 21: mod_base = OTHER; note = 2'-deoxythymidine
  source 1..21: mol_type = other RNA
agaaacctgtctcttggattt

SEQ ID NO: 1114 - RNA, 21 nt, synthetic construct
  modified_base 20..21: mod_base = OTHER; note = thymine
  modified_base 1: mod_base = OTHER; note = guanosine
  modified_base 2: mod_base = OTHER; note = adenosine
  modified_base 3: mod_base = OTHER; note = adenosine
  modified_base 4: mod_base = OTHER; note = adenosine
  modified_base 5: mod_base = cm
  modified_base 6: mod_base = cm
  modified_base 7: mod_base = um
  modified_base 8: mod_base = OTHER; note = guanosine
  modified_base 9: mod_base = um
  modified_base 10: mod_base = cm
  modified_base 11: mod_base = um
  modified_base 12: mod_base = cm
  modified_base 13: mod_base = um
  modified_base 14: mod_base = um
  modified_base 15: mod_base = OTHER; note = guanosine
  modified_base 16: mod_base = OTHER; note = guanosine
  modified_base 17: mod_base = OTHER; note = adenosine
  modified_base 18: mod_base = um
  modified_base 19: mod_base = OTHER; note = adenosine
  modified_base 20: mod_base = OTHER; note = 2'-deoxythymidine
  modified_base 21: mod_base = OTHER; note = 2'-deoxythymidine
  source 1..21: mol_type = other RNA
gaaacctgtctcttggatatt

SEQ ID NO: 1115 - RNA, 21 nt, synthetic construct
  modified_base 20..21: mod_base = OTHER; note = thymine
  modified_base 1: mod_base = OTHER; note = adenosine
  modified_base 2: mod_base = OTHER; note = adenosine
  modified_base 3: mod_base = OTHER; note = adenosine
  modified_base 4: mod_base = cm
  modified_base 5: mod_base = cm
  modified_base 6: mod_base = um
  modified_base 7: mod_base = OTHER; note = guanosine
  modified_base 8: mod_base = um
  modified_base 9: mod_base = cm
  modified_base 10: mod_base = um
  modified_base 11: mod_base = cm
  modified_base 12: mod_base = um
  modified_base 13: mod_base = um
  modified_base 14: mod_base = OTHER; note = guanosine
  modified_base 15: mod_base = OTHER; note = guanosine
  modified_base 16: mod_base = OTHER; note = adenosine
  modified_base 17: mod_base = um
  modified_base 18: mod_base = OTHER; note = adenosine
  modified_base 19: mod_base = um
  modified_base 20: mod_base = OTHER; note = 2'-deoxythymidine
  modified_base 21: mod_base = OTHER; note = 2'-deoxythymidine
  source 1..21: mol_type = other RNA
aaacctgtctcttggatattt

SEQ ID NO: 1116 - RNA, 21 nt, synthetic construct
  modified_base 20..21: mod_base = OTHER; note = thymine
  modified_base 1: mod_base = OTHER; note = adenosine
  modified_base 2: mod_base = OTHER; note = adenosine
  modified_base 3: mod_base = cm
  modified_base 4: mod_base = cm
  modified_base 5: mod_base = um
  modified_base 6: mod_base = OTHER; note = guanosine
  modified_base 7: mod_base = um
  modified_base 8: mod_base = cm
  modified_base 9: mod_base = um
  modified_base 10: mod_base = cm
  modified_base 11: mod_base = um
  modified_base 12: mod_base = um
  modified_base 13: mod_base = OTHER; note = guanosine
  modified_base 14: mod_base = OTHER; note = guanosine
  modified_base 15: mod_base = OTHER; note = adenosine
  modified_base 16: mod_base = um
  modified_base 17: mod_base = OTHER; note = adenosine
  modified_base 18: mod_base = um
  modified_base 19: mod_base = um
  modified_base 20: mod_base = OTHER; note = 2'-deoxythymidine
  modified_base 21: mod_base = OTHER; note = 2'-deoxythymidine
  source 1..21: mol_type = other RNA
aacctgtctcttggatatttt

SEQ ID NO: 1117 - RNA, 21 nt, synthetic construct
  modified_base 20..21: mod_base = OTHER; note = thymine
  modified_base 1: mod_base = OTHER; note = adenosine
  modified_base 2: mod_base = cm
  modified_base 3: mod_base = cm
  modified_base 4: mod_base = um
  modified_base 5: mod_base = OTHER; note = guanosine
  modified_base 6: mod_base = um
  modified_base 7: mod_base = cm
  modified_base 8: mod_base = um
  modified_base 9: mod_base = cm
  modified_base 10: mod_base = um
  modified_base 11: mod_base = um
  modified_base 12: mod_base = OTHER; note = guanosine
  modified_base 13: mod_base = OTHER; note = guanosine
  modified_base 14: mod_base = OTHER; note = adenosine
  modified_base 15: mod_base = um
  modified_base 16: mod_base = OTHER; note = adenosine
  modified_base 17: mod_base = um
  modified_base 18: mod_base = um
  modified_base 19: mod_base = cm
  modified_base 20: mod_base = OTHER; note = 2'-deoxythymidine
  modified_base 21: mod_base = OTHER; note = 2'-deoxythymidine
  source 1..21: mol_type = other RNA
acctgtctcttggatattctt

SEQ ID NO: 1118 - RNA, 21 nt, synthetic construct
  modified_base 20..21: mod_base = OTHER; note = thymine
  modified_base 1: mod_base = cm
  modified_base 2: mod_base = cm
  modified_base 3: mod_base = um
  modified_base 4: mod_base = OTHER; note = guanosine
  modified_base 5: mod_base = um
  modified_base 6: mod_base = cm
  modified_base 7: mod_base = um
  modified_base 8: mod_base = cm
  modified_base 9: mod_base = um
  modified_base 10: mod_base = um
  modified_base 11: mod_base = OTHER; note = guanosine
  modified_base 12: mod_base = OTHER; note = guanosine
  modified_base 13: mod_base = OTHER; note = adenosine
  modified_base 14: mod_base = um
  modified_base 15: mod_base = OTHER; note = adenosine
  modified_base 16: mod_base = um
  modified_base 17: mod_base = um
  modified_base 18: mod_base = cm
  modified_base 19: mod_base = um
  modified_base 20: mod_base = OTHER; note = 2'-deoxythymidine
  modified_base 21: mod_base = OTHER; note = 2'-deoxythymidine
  source 1..21: mol_type = other RNA
cctgtctcttggatattcttt

SEQ ID NO: 1119 - RNA, 21 nt, synthetic construct
  modified_base 20..21: mod_base = OTHER; note = thymine
  modified_base 1: mod_base = cm
  modified_base 2: mod_base = um
  modified_base 3: mod_base = OTHER; note = guanosine
  modified_base 4: mod_base = um
  modified_base 5: mod_base = cm
  modified_base 6: mod_base = um
  modified_base 7: mod_base = cm
  modified_base 8: mod_base = um
  modified_base 9: mod_base = um
  modified_base 10: mod_base = OTHER; note = guanosine
  modified_base 11: mod_base = OTHER; note = guanosine
  modified_base 12: mod_base = OTHER; note = adenosine
  modified_base 13: mod_base = um
  modified_base 14: mod_base = OTHER; note = adenosine
  modified_base 15: mod_base = um
  modified_base 16: mod_base = um
  modified_base 17: mod_base = cm
  modified_base 18: mod_base = um
  modified_base 19: mod_base = cm
  modified_base 20: mod_base = OTHER; note = 2'-deoxythymidine
  modified_base 21: mod_base = OTHER; note = 2'-deoxythymidine
  source 1..21: mol_type = other RNA
ctgtctcttggatattctctt

SEQ ID NO: 1120 - RNA, 21 nt, synthetic construct
  modified_base 20..21: mod_base = OTHER; note = thymine
  modified_base 1: mod_base = um
  modified_base 2: mod_base = OTHER; note = guanosine
  modified_base 3: mod_base = um
  modified_base 4: mod_base = cm
  modified_base 5: mod_base = um
  modified_base 6: mod_base = cm
  modified_base 7: mod_base = um
  modified_base 8: mod_base = um
  modified_base 9: mod_base = OTHER; note = guanosine
  modified_base 10: mod_base = OTHER; note = guanosine
  modified_base 11: mod_base = OTHER; note = adenosine
  modified_base 12: mod_base = um
  modified_base 13: mod_base = OTHER; note = adenosine
  modified_base 14: mod_base = um
  modified_base 15: mod_base = um
  modified_base 16: mod_base = cm
  modified_base 17: mod_base = um
  modified_base 18: mod_base = cm
  modified_base 19: mod_base = OTHER; note = guanosine
  modified_base 20: mod_base = OTHER; note = 2'-deoxythymidine
  modified_base 21: mod_base = OTHER; note = 2'-deoxythymidine
  source 1..21: mol_type = other RNA
tgtctcttggatattctcgtt

SEQ ID NO: 1121 - RNA, 21 nt, synthetic construct
  modified_base 20..21: mod_base = OTHER; note = thymine
  modified_base 1: mod_base = OTHER; note = guanosine
  modified_base 2: mod_base = um
  modified_base 3: mod_base = cm
  modified_base 4: mod_base = um
  modified_base 5: mod_base = cm
  modified_base 6: mod_base = um
  modified_base 7: mod_base = um
  modified_base 8: mod_base = OTHER; note = guanosine
  modified_base 9: mod_base = OTHER; note = guanosine
  modified_base 10: mod_base = OTHER; note = adenosine
  modified_base 11: mod_base = um
  modified_base 12: mod_base = OTHER; note = adenosine
  modified_base 13: mod_base = um
  modified_base 14: mod_base = um
  modified_base 15: mod_base = cm
  modified_base 16: mod_base = um
  modified_base 17: mod_base = cm
  modified_base 18: mod_base = OTHER; note = guanosine
  modified_base 19: mod_base = OTHER; note = adenosine
  modified_base 20: mod_base = OTHER; note = 2'-deoxythymidine
  modified_base 21: mod_base = OTHER; note = 2'-deoxythymidine
  source 1..21: mol_type = other RNA
gtctcttggatattctcgatt

SEQ ID NO: 1122 - RNA, 21 nt, synthetic construct
  modified_base 20..21: mod_base = OTHER; note = thymine
  modified_base 1: mod_base = um
  modified_base 2: mod_base = cm
  modified_base 3: mod_base = um
  modified_base 4: mod_base = cm
  modified_base 5: mod_base = um
  modified_base 6: mod_base = um
  modified_base 7: mod_base = OTHER; note = guanosine
  modified_base 8: mod_base = OTHER; note = guanosine
  modified_base 9: mod_base = OTHER; note = adenosine
  modified_base 10: mod_base = um
  modified_base 11: mod_base = OTHER; note = adenosine
  modified_base 12: mod_base = um
  modified_base 13: mod_base = um
  modified_base 14: mod_base = cm
  modified_base 15: mod_base = um
  modified_base 16: mod_base = cm
  modified_base 17: mod_base = OTHER; note = guanosine
  modified_base 18: mod_base = OTHER; note = adenosine
  modified_base 19: mod_base = cm
  modified_base 20: mod_base = OTHER; note = 2'-deoxythymidine
  modified_base 21: mod_base = OTHER; note = 2'-deoxythymidine
  source 1..21: mol_type = other RNA
tctcttggatattctcgactt

SEQ ID NO: 1123 - RNA, 21 nt, synthetic construct
  modified_base 20..21: mod_base = OTHER; note = thymine
  modified_base 1: mod_base = cm
  modified_base 2: mod_base = um
  modified_base 3: mod_base = cm
  modified_base 4: mod_base = um
  modified_base 5: mod_base = um
  modified_base 6: mod_base = OTHER; note = guanosine
  modified_base 7: mod_base = OTHER; note = guanosine
  modified_base 8: mod_base = OTHER; note = adenosine
  modified_base 9: mod_base = um
  modified_base 10: mod_base = OTHER; note = adenosine
  modified_base 11: mod_base = um
  modified_base 12: mod_base = um
  modified_base 13: mod_base = cm
  modified_base 14: mod_base = um
  modified_base 15: mod_base = cm
  modified_base 16: mod_base = OTHER; note = guanosine
  modified_base 17: mod_base = OTHER; note = adenosine
  modified_base 18: mod_base = cm
  modified_base 19: mod_base = OTHER; note = adenosine
  modified_base 20: mod_base = OTHER; note = 2'-deoxythymidine
  modified_base 21: mod_base = OTHER; note = 2'-deoxythymidine
  source 1..21: mol_type = other RNA
ctcttggatattctcgacatt

SEQ ID NO: 1124 - RNA, 21 nt, synthetic construct
  modified_base 20..21: mod_base = OTHER; note = thymine
  modified_base 1: mod_base = um
  modified_base 2: mod_base = cm
  modified_base 3: mod_base = um
  modified_base 4: mod_base = um
  modified_base 5: mod_base = OTHER; note = guanosine
  modified_base 6: mod_base = OTHER; note = guanosine
  modified_base 7: mod_base = OTHER; note = adenosine
  modified_base 8: mod_base = um
  modified_base 9: mod_base = OTHER; note = adenosine
  modified_base 10: mod_base = um
  modified_base 11: mod_base = um
  modified_base 12: mod_base = cm
  modified_base 13: mod_base = um
  modified_base 14: mod_base = cm
  modified_base 15: mod_base = OTHER; note = guanosine
  modified_base 16: mod_base = OTHER; note = adenosine
  modified_base 17: mod_base = cm
  modified_base 18: mod_base = OTHER; note = adenosine
  modified_base 19: mod_base = cm
  modified_base 20: mod_base = OTHER; note = 2'-deoxythymidine
  modified_base 21: mod_base = OTHER; note = 2'-deoxythymidine
  source 1..21: mol_type = other RNA
tcttggatattctcgacactt

SEQ ID NO: 1125 - RNA, 21 nt, synthetic construct
  modified_base 20..21: mod_base = OTHER; note = thymine
  modified_base 1: mod_base = cm
  modified_base 2: mod_base = um
  modified_base 3: mod_base = um
  modified_base 4: mod_base = OTHER; note = guanosine
  modified_base 5: mod_base = OTHER; note = guanosine
  modified_base 6: mod_base = OTHER; note = adenosine
  modified_base 7: mod_base = um
  modified_base 8: mod_base = OTHER; note = adenosine
  modified_base 9: mod_base = um
  modified_base 10: mod_base = um
  modified_base 11: mod_base = cm
  modified_base 12: mod_base = um
  modified_base 13: mod_base = cm
  modified_base 14: mod_base = OTHER; note = guanosine
  modified_base 15: mod_base = OTHER; note = adenosine
  modified_base 16: mod_base = cm
  modified_base 17: mod_base = OTHER; note = adenosine
  modified_base 18: mod_base = cm
  modified_base 19: mod_base = OTHER; note = adenosine
  modified_base 20: mod_base = OTHER; note = 2'-deoxythymidine
  modified_base 21: mod_base = OTHER; note = 2'-deoxythymidine
  source 1..21: mol_type = other RNA
cttggatattctcgacacatt

SEQ ID NO: 1126 - RNA, 21 nt, synthetic construct
  modified_base 20..21: mod_base = OTHER; note = thymine
  modified_base 1: mod_base = OTHER; note = adenosine
  modified_base 2: mod_base = OTHER; note = guanosine
  modified_base 3: mod_base = um
  modified_base 4: mod_base = OTHER; note = adenosine
  modified_base 5: mod_base = cm
  modified_base 6: mod_base = OTHER; note = adenosine
  modified_base 7: mod_base = OTHER; note = guanosine
  modified_base 8: mod_base = um
  modified_base 9: mod_base = OTHER; note = guanosine
  modified_base 10: mod_base = cm
  modified_base 11: mod_base = OTHER; note = adenosine
  modified_base 12: mod_base = OTHER; note = adenosine
  modified_base 13: mod_base = um
  modified_base 14: mod_base = OTHER; note = guanosine
  modified_base 15: mod_base = OTHER; note = adenosine
  modified_base 16: mod_base = OTHER; note = guanosine
  modified_base 17: mod_base = OTHER; note = guanosine
  modified_base 18: mod_base = OTHER; note = guanosine
  modified_base 19: mod_base = OTHER; note = adenosine
  modified_base 20: mod_base = OTHER; note = 2'-deoxythymidine
  modified_base 21: mod_base = OTHER; note = 2'-deoxythymidine
  source 1..21: mol_type = other RNA
agtacagtgcaatgagggatt

SEQ ID NO: 1127 - RNA, 21 nt, synthetic construct
  modified_base 20..21: mod_base = OTHER; note = thymine
  modified_base 1: mod_base = OTHER; note = guanosine
  modified_base 2: mod_base = um
  modified_base 3: mod_base = OTHER; note = adenosine
  modified_base 4: mod_base = cm
  modified_base 5: mod_base = OTHER; note = adenosine
  modified_base 6: mod_base = OTHER; note = guanosine
  modified_base 7: mod_base = um
  modified_base 8: mod_base = OTHER; note = guanosine
  modified_base 9: mod_base = cm
  modified_base 10: mod_base = OTHER; note = adenosine
  modified_base 11: mod_base = OTHER; note = adenosine
  modified_base 12: mod_base = um
  modified_base 13: mod_base = OTHER; note = guanosine
  modified_base 14: mod_base = OTHER; note = adenosine
  modified_base 15: mod_base = OTHER; note = guanosine
  modified_base 16: mod_base = OTHER; note = guanosine
  modified_base 17: mod_base = OTHER; note = guanosine
  modified_base 18: mod_base = OTHER; note = adenosine
  modified_base 19: mod_base = cm
  modified_base 20: mod_base = OTHER; note = 2'-deoxythymidine
  modified_base 21: mod_base = OTHER; note = 2'-deoxythymidine
  source 1..21: mol_type = other RNA
gtacagtgcaatgagggactt

SEQ ID NO: 1128 - RNA, 21 nt, synthetic construct
  modified_base 20..21: mod_base = OTHER; note = thymine
  modified_base 1: mod_base = um
  modified_base 2: mod_base = OTHER; note = adenosine
  modified_base 3: mod_base = cm
  modified_base 4: mod_base = OTHER; note = adenosine
  modified_base 5: mod_base = OTHER; note = guanosine
  modified_base 6: mod_base = um
  modified_base 7: mod_base = OTHER; note = guanosine
  modified_base 8: mod_base = cm
  modified_base 9: mod_base = OTHER; note = adenosine
  modified_base 10: mod_base = OTHER; note = adenosine
  modified_base 11: mod_base = um
  modified_base 12: mod_base = OTHER; note = guanosine
  modified_base 13: mod_base = OTHER; note = adenosine
  modified_base 14: mod_base = OTHER; note = guanosine
  modified_base 15: mod_base = OTHER; note = guanosine
  modified_base 16: mod_base = OTHER; note = guanosine
  modified_base 17: mod_base = OTHER; note = adenosine
  modified_base 18: mod_base = cm
  modified_base 19: mod_base = cm
  modified_base 20: mod_base = OTHER; note = 2'-deoxythymidine
  modified_base 21: mod_base = OTHER; note = 2'-deoxythymidine
  source 1..21: mol_type = other RNA
tacagtgcaatgagggacctt

SEQ ID NO: 1129 - RNA, 21 nt, synthetic construct
  modified_base 20..21: mod_base = OTHER; note = thymine
  modified_base 1: mod_base = OTHER; note = adenosine
  modified_base 2: mod_base = cm
  modified_base 3: mod_base = OTHER; note = adenosine
  modified_base 4: mod_base = OTHER; note = guanosine
  modified_base 5: mod_base = um
  modified_base 6: mod_base = OTHER; note = guanosine
  modified_base 7: mod_base = cm
  modified_base 8: mod_base = OTHER; note = adenosine
  modified_base 9: mod_base = OTHER; note = adenosine
  modified_base 10: mod_base = um
  modified_base 11: mod_base = OTHER; note = guanosine
  modified_base 12: mod_base = OTHER; note = adenosine
  modified_base 13: mod_base = OTHER; note = guanosine
  modified_base 14: mod_base = OTHER; note = guanosine
  modified_base 15: mod_base = OTHER; note = guanosine
  modified_base 16: mod_base = OTHER; note = adenosine
  modified_base 17: mod_base = cm
  modified_base 18: mod_base = cm
  modified_base 19: mod_base = OTHER; note = adenosine
  modified_base 20: mod_base = OTHER; note = 2'-deoxythymidine
  modified_base 21: mod_base = OTHER; note = 2'-deoxythymidine
  source 1..21: mol_type = other RNA
acagtgcaatgagggaccatt

SEQ ID NO: 1130 - RNA, 21 nt, synthetic construct
  modified_base 20..21: mod_base = OTHER; note = thymine
  modified_base 1: mod_base = cm
  modified_base 2: mod_base = OTHER; note = adenosine
  modified_base 3: mod_base = OTHER; note = guanosine
  modified_base 4: mod_base = um
  modified_base 5: mod_base = OTHER; note = guanosine
  modified_base 6: mod_base = cm
  modified_base 7: mod_base = OTHER; note = adenosine
  modified_base 8: mod_base = OTHER; note = adenosine
  modified_base 9: mod_base = um
  modified_base 10: mod_base = OTHER; note = guanosine
  modified_base 11: mod_base = OTHER; note = adenosine
  modified_base 12: mod_base = OTHER; note = guanosine
  modified_base 13: mod_base = OTHER; note = guanosine
  modified_base 14: mod_base = OTHER; note = guanosine
  modified_base 15: mod_base = OTHER; note = adenosine
  modified_base 16: mod_base = cm
  modified_base 17: mod_base = cm
  modified_base 18: mod_base = OTHER; note = adenosine
  modified_base 19: mod_base = OTHER; note = guanosine
  modified_base 20: mod_base = OTHER; note = 2'-deoxythymidine
  modified_base 21: mod_base = OTHER; note = 2'-deoxythymidine
  source 1..21: mol_type = other RNA
cagtgcaatgagggaccagtt

SEQ ID NO: 1131 - RNA, 21 nt, synthetic construct
  modified_base 20..21: mod_base = OTHER; note = thymine
  modified_base 1: mod_base = OTHER; note = adenosine
  modified_base 2: mod_base = OTHER; note = guanosine
  modified_base 3: mod_base = um
  modified_base 4: mod_base = OTHER; note = guanosine
  modified_base 5: mod_base = cm
  modified_base 6: mod_base = OTHER; note = adenosine
  modified_base 7: mod_base = OTHER; note = adenosine
  modified_base 8: mod_base = um
  modified_base 9: mod_base = OTHER; note = guanosine
  modified_base 10: mod_base = OTHER; note = adenosine
  modified_base 11: mod_base = OTHER; note = guanosine
  modified_base 12: mod_base = OTHER; note = guanosine
  modified_base 13: mod_base = OTHER; note = guanosine
  modified_base 14: mod_base = OTHER; note = adenosine
  modified_base 15: mod_base = cm
  modified_base 16: mod_base = cm
  modified_base 17: mod_base = OTHER; note = adenosine
  modified_base 18: mod_base = OTHER; note = guanosine
  modified_base 19: mod_base = um
  modified_base 20: mod_base = OTHER; note = 2'-deoxythymidine
  modified_base 21: mod_base = OTHER; note = 2'-deoxythymidine
  source 1..21: mol_type = other RNA
agtgcaatgagggaccagttt

SEQ ID NO: 1132 - RNA, 21 nt, synthetic construct
  modified_base 20..21: mod_base = OTHER; note = thymine
  modified_base 1: mod_base = OTHER; note = guanosine
  modified_base 2: mod_base = um
  modified_base 3: mod_base = OTHER; note = guanosine
  modified_base 4: mod_base = cm
  modified_base 5: mod_base = OTHER; note = adenosine
  modified_base 6: mod_base = OTHER; note = adenosine
  modified_base 7: mod_base = um
  modified_base 8: mod_base = OTHER; note = guanosine
  modified_base 9: mod_base = OTHER; note = adenosine
  modified_base 10: mod_base = OTHER; note = guanosine
  modified_base 11: mod_base = OTHER; note = guanosine
  modified_base 12: mod_base = OTHER; note = guanosine
  modified_base 13: mod_base = OTHER; note = adenosine
  modified_base 14: mod_base = cm
  modified_base 15: mod_base = cm
  modified_base 16: mod_base = OTHER; note = adenosine
  modified_base 17: mod_base = OTHER; note = guanosine
  modified_base 18: mod_base = um
  modified_base 19: mod_base = OTHER; note = adenosine
  modified_base 20: mod_base = OTHER; note = 2'-deoxythymidine
  modified_base 21: mod_base = OTHER; note = 2'-deoxythymidine
  source 1..21: mol_type = other RNA
gtgcaatgagggaccagtatt

SEQ ID NO: 1133 - RNA, 21 nt, synthetic construct
  modified_base 20..21: mod_base = OTHER; note = thymine
  modified_base 1: mod_base = um
  modified_base 2: mod_base = OTHER; note = guanosine
  modified_base 3: mod_base = cm
  modified_base 4: mod_base = OTHER; note = adenosine
  modified_base 5: mod_base = OTHER; note = adenosine
  modified_base 6: mod_base = um
  modified_base 7: mod_base = OTHER; note = guanosine
  modified_base 8: mod_base = OTHER; note = adenosine
  modified_base 9: mod_base = OTHER; note = guanosine
  modified_base 10: mod_base = OTHER; note = guanosine
  modified_base 11: mod_base = OTHER; note = guanosine
  modified_base 12: mod_base = OTHER; note = adenosine
  modified_base 13: mod_base = cm
  modified_base 14: mod_base = cm
  modified_base 15: mod_base = OTHER; note = adenosine
  modified_base 16: mod_base = OTHER; note = guanosine
  modified_base 17: mod_base = um
  modified_base 18: mod_base = OTHER; note = adenosine
  modified_base 19: mod_base = cm
  modified_base 20: mod_base = OTHER; note = 2'-deoxythymidine
  modified_base 21: mod_base = OTHER; note = 2'-deoxythymidine
  source 1..21: mol_type = other RNA
tgcaatgagggaccagtactt

SEQ ID NO: 1134 - RNA, 21 nt, synthetic construct
  modified_base 20..21: mod_base = OTHER; note = thymine
  modified_base 1: mod_base = OTHER; note = guanosine
  modified_base 2: mod_base = cm
  modified_base 3: mod_base = OTHER; note = adenosine
  modified_base 4: mod_base = OTHER; note = adenosine
  modified_base 5: mod_base = um
  modified_base 6: mod_base = OTHER; note = guanosine
  modified_base 7: mod_base = OTHER; note = adenosine
  modified_base 8: mod_base = OTHER; note = guanosine
  modified_base 9: mod_base = OTHER; note = guanosine
  modified_base 10: mod_base = OTHER; note = guanosine
  modified_base 11: mod_base = OTHER; note = adenosine
  modified_base 12: mod_base = cm
  modified_base 13: mod_base = cm
  modified_base 14: mod_base = OTHER; note = adenosine
  modified_base 15: mod_base = OTHER; note = guanosine
  modified_base 16: mod_base = um
  modified_base 17: mod_base = OTHER; note = adenosine
  modified_base 18: mod_base = cm
  modified_base 19: mod_base = OTHER; note = adenosine
  modified_base 20: mod_base = OTHER; note = 2'-deoxythymidine
  modified_base 21: mod_base = OTHER; note = 2'-deoxythymidine
  source 1..21: mol_type = other RNA
gcaatgagggaccagtacatt

SEQ ID NO: 1135 - RNA, 21 nt, synthetic construct
  modified_base 20..21: mod_base = OTHER; note = thymine
  modified_base 1: mod_base = cm
  modified_base 2: mod_base = OTHER; note = adenosine
  modified_base 3: mod_base = OTHER; note = adenosine
  modified_base 4: mod_base = um
  modified_base 5: mod_base = OTHER; note = guanosine
  modified_base 6: mod_base = OTHER; note = adenosine
  modified_base 7: mod_base = OTHER; note = guanosine
  modified_base 8: mod_base = OTHER; note = guanosine
  modified_base 9: mod_base = OTHER; note = guanosine
  modified_base 10: mod_base = OTHER; note = adenosine
  modified_base 11: mod_base = cm
  modified_base 12: mod_base = cm
  modified_base 13: mod_base = OTHER; note = adenosine
  modified_base 14: mod_base = OTHER; note = guanosine
  modified_base 15: mod_base = um
  modified_base 16: mod_base = OTHER; note = adenosine
  modified_base 17: mod_base = cm
  modified_base 18: mod_base = OTHER; note = adenosine
  modified_base 19: mod_base = um
  modified_base 20: mod_base = OTHER; note = 2'-deoxythymidine
  modified_base 21: mod_base = OTHER; note = 2'-deoxythymidine
  source 1..21: mol_type = other RNA
caatgagggaccagtacattt

SEQ ID NO: 1136 - RNA, 21 nt, synthetic construct
  modified_base 20..21: mod_base = OTHER; note = thymine
  modified_base 1: mod_base = OTHER; note = adenosine
  modified_base 2: mod_base = OTHER; note = adenosine
  modified_base 3: mod_base = um
  modified_base 4: mod_base = OTHER; note = guanosine
  modified_base 5: mod_base = OTHER; note = adenosine
  modified_base 6: mod_base = OTHER; note = guanosine
  modified_base 7: mod_base = OTHER; note = guanosine
  modified_base 8: mod_base = OTHER; note = guanosine
  modified_base 9: mod_base = OTHER; note = adenosine
  modified_base 10: mod_base = cm
  modified_base 11: mod_base = cm
  modified_base 12: mod_base = OTHER; note = adenosine
  modified_base 13: mod_base = OTHER; note = guanosine
  modified_base 14: mod_base = um
  modified_base 15: mod_base = OTHER; note = adenosine
  modified_base 16: mod_base = cm
  modified_base 17: mod_base = OTHER; note = adenosine
  modified_base 18: mod_base = um
  modified_base 19: mod_base = OTHER; note = guanosine
  modified_base 20: mod_base = OTHER; note = 2'-deoxythymidine
  modified_base 21: mod_base = OTHER; note = 2'-deoxythymidine
  source 1..21: mol_type = other RNA
aatgagggaccagtacatgtt

SEQ ID NO: 1137 - RNA, 21 nt, synthetic construct
  modified_base 20..21: mod_base = OTHER; note = thymine
  modified_base 1: mod_base = OTHER; note = adenosine
  modified_base 2: mod_base = um
  modified_base 3: mod_base = OTHER; note = guanosine
  modified_base 4: mod_base = OTHER; note = adenosine
  modified_base 5: mod_base = OTHER; note = guanosine
  modified_base 6: mod_base = OTHER; note = guanosine
  modified_base 7: mod_base = OTHER; note = guanosine
  modified_base 8: mod_base = OTHER; note = adenosine
  modified_base 9: mod_base = cm
  modified_base 10: mod_base = cm
  modified_base 11: mod_base = OTHER; note = adenosine
  modified_base 12: mod_base = OTHER; note = guanosine
  modified_base 13: mod_base = um
  modified_base 14: mod_base = OTHER; note = adenosine
  modified_base 15: mod_base = cm
  modified_base 16: mod_base = OTHER; note = adenosine
  modified_base 17: mod_base = um
  modified_base 18: mod_base = OTHER; note = guanosine
  modified_base 19: mod_base = OTHER; note = adenosine
  modified_base 20: mod_base = OTHER; note = 2'-deoxythymidine
  modified_base 21: mod_base = OTHER; note = 2'-deoxythymidine
  source 1..21: mol_type = other RNA
atgagggaccagtacatgatt

SEQ ID NO: 1138 - RNA, 21 nt, synthetic construct
  modified_base 20..21: mod_base = OTHER; note = thymine
  modified_base 1: mod_base = um
  modified_base 2: mod_base = OTHER; note = guanosine
  modified_base 3: mod_base = OTHER; note = adenosine
  modified_base 4: mod_base = OTHER; note = guanosine
  modified_base 5: mod_base = OTHER; note = guanosine
  modified_base 6: mod_base = OTHER; note = guanosine
  modified_base 7: mod_base = OTHER; note = adenosine
  modified_base 8: mod_base = cm
  modified_base 9: mod_base = cm
  modified_base 10: mod_base = OTHER; note = adenosine
  modified_base 11: mod_base = OTHER; note = guanosine
  modified_base 12: mod_base = um
  modified_base 13: mod_base = OTHER; note = adenosine
  modified_base 14: mod_base = cm
  modified_base 15: mod_base = OTHER; note = adenosine
  modified_base 16: mod_base = um
  modified_base 17: mod_base = OTHER; note = guanosine
  modified_base 18: mod_base = OTHER; note = adenosine
  modified_base 19: mod_base = OTHER; note = guanosine
  modified_base 20: mod_base = OTHER; note = 2'-deoxythymidine
  modified_base 21: mod_base = OTHER; note = 2'-deoxythymidine
  source 1..21: mol_type = other RNA
tgagggaccagtacatgagtt

SEQ ID NO: 1139 - RNA, 21 nt, synthetic construct
  modified_base 20..21: mod_base = OTHER; note = thymine
  modified_base 1: mod_base = OTHER; note = guanosine
  modified_base 2: mod_base = OTHER; note = adenosine
  modified_base 3: mod_base = OTHER; note = guanosine
  modified_base 4: mod_base = OTHER; note = guanosine
  modified_base 5: mod_base = OTHER; note = guanosine
  modified_base 6: mod_base = OTHER; note = adenosine
  modified_base 7: mod_base = cm
  modified_base 8: mod_base = cm
  modified_base 9: mod_base = OTHER; note = adenosine
  modified_base 10: mod_base = OTHER; note = guanosine
  modified_base 11: mod_base = um
  modified_base 12: mod_base = OTHER; note = adenosine
  modified_base 13: mod_base = cm
  modified_base 14: mod_base = OTHER; note = adenosine
  modified_base 15: mod_base = um
  modified_base 16: mod_base = OTHER; note = guanosine
  modified_base 17: mod_base = OTHER; note = adenosine
  modified_base 18: mod_base = OTHER; note = guanosine
  modified_base 19: mod_base = OTHER; note = guanosine
  modified_base 20: mod_base = OTHER; note = 2'-deoxythymidine
  modified_base 21: mod_base = OTHER; note = 2'-deoxythymidine
  source 1..21: mol_type = other RNA
gagggaccagtacatgaggtt

SEQ ID NO: 1140 - RNA, 21 nt, synthetic construct
  modified_base 20..21: mod_base = OTHER; note = thymine
  modified_base 1: mod_base = OTHER; note = adenosine
  modified_base 2: mod_base = OTHER; note = guanosine
  modified_base 3: mod_base = OTHER; note = guanosine
  modified_base 4: mod_base = OTHER; note = guanosine
  modified_base 5: mod_base = OTHER; note = adenosine
  modified_base 6: mod_base = cm
  modified_base 7: mod_base = cm
  modified_base 8: mod_base = OTHER; note = adenosine
  modified_base 9: mod_base = OTHER; note = guanosine
  modified_base 10: mod_base = um
  modified_base 11: mod_base = OTHER; note = adenosine
  modified_base 12: mod_base = cm
  modified_base 13: mod_base = OTHER; note = adenosine
  modified_base 14: mod_base = um
  modified_base 15: mod_base = OTHER; note = guanosine
  modified_base 16: mod_base = OTHER; note = adenosine
  modified_base 17: mod_base = OTHER; note = guanosine
  modified_base 18: mod_base = OTHER; note = guanosine
  modified_base 19: mod_base = OTHER; note = adenosine
  modified_base 20: mod_base = OTHER; note = 2'-deoxythymidine
  modified_base 21: mod_base = OTHER; note = 2'-deoxythymidine
  source 1..21: mol_type = other RNA
agggaccagtacatgaggatt

SEQ ID NO: 1141 - RNA, 21 nt, synthetic construct
  modified_base 20..21: mod_base = OTHER; note = thymine
  modified_base 1: mod_base = OTHER; note = guanosine
  modified_base 2: mod_base = OTHER; note = guanosine
  modified_base 3: mod_base = OTHER; note = guanosine
  modified_base 4: mod_base = OTHER; note = adenosine
  modified_base 5: mod_base = cm
  modified_base 6: mod_base = cm
  modified_base 7: mod_base = OTHER; note = adenosine
  modified_base 8: mod_base = OTHER; note = guanosine
  modified_base 9: mod_base = um
  modified_base 10: mod_base = OTHER; note = adenosine
  modified_base 11: mod_base = cm
  modified_base 12: mod_base = OTHER; note = adenosine
  modified_base 13: mod_base = um
  modified_base 14: mod_base = OTHER; note = guanosine
  modified_base 15: mod_base = OTHER; note = adenosine
  modified_base 16: mod_base = OTHER; note = guanosine
  modified_base 17: mod_base = OTHER; note = guanosine
  modified_base 18: mod_base = OTHER; note = adenosine
  modified_base 19: mod_base = cm
  modified_base 20: mod_base = OTHER; note = 2'-deoxythymidine
  modified_base 21: mod_base = OTHER; note = 2'-deoxythymidine
  source 1..21: mol_type = other RNA
gggaccagtacatgaggactt

SEQ ID NO: 1142 - RNA, 21 nt, synthetic construct
  modified_base 20..21: mod_base = OTHER; note = thymine
  modified_base 1: mod_base = OTHER; note = guanosine
  modified_base 2: mod_base = OTHER; note = guanosine
  modified_base 3: mod_base = OTHER; note = adenosine
  modified_base 4: mod_base = cm
  modified_base 5: mod_base = cm
  modified_base 6: mod_base = OTHER; note = adenosine
  modified_base 7: mod_base = OTHER; note = guanosine
  modified_base 8: mod_base = um
  modified_base 9: mod_base = OTHER; note = adenosine
  modified_base 10: mod_base = cm
  modified_base 11: mod_base = OTHER; note = adenosine
  modified_base 12: mod_base = um
  modified_base 13: mod_base = OTHER; note = guanosine
  modified_base 14: mod_base = OTHER; note = adenosine
  modified_base 15: mod_base = OTHER; note = guanosine
  modified_base 16: mod_base = OTHER; note = guanosine
  modified_base 17: mod_base = OTHER; note = adenosine
  modified_base 18: mod_base = cm
  modified_base 19: mod_base = um
  modified_base 20: mod_base = OTHER; note = 2'-deoxythymidine
  modified_base 21: mod_base = OTHER; note = 2'-deoxythymidine
  source 1..21: mol_type = other RNA
ggaccagtacatgaggacttt

SEQ ID NO: 1143 - RNA, 21 nt, synthetic construct
  modified_base 20..21: mod_base = OTHER; note = thymine
  modified_base 1: mod_base = OTHER; note = guanosine
  modified_base 2: mod_base = OTHER; note = adenosine
  modified_base 3: mod_base = cm
  modified_base 4: mod_base = cm
  modified_base 5: mod_base = OTHER; note = adenosine
  modified_base 6: mod_base = OTHER; note = guanosine
  modified_base 7: mod_base = um
  modified_base 8: mod_base = OTHER; note = adenosine
  modified_base 9: mod_base = cm
  modified_base 10: mod_base = OTHER; note = adenosine
  modified_base 11: mod_base = um
  modified_base 12: mod_base = OTHER; note = guanosine
  modified_base 13: mod_base = OTHER; note = adenosine
  modified_base 14: mod_base = OTHER; note = guanosine
  modified_base 15: mod_base = OTHER; note = guanosine
  modified_base 16: mod_base = OTHER; note = adenosine
  modified_base 17: mod_base = cm
  modified_base 18: mod_base = um
  modified_base 19: mod_base = OTHER; note = guanosine
  modified_base 20: mod_base = OTHER; note = 2'-deoxythymidine
  modified_base 21: mod_base = OTHER; note = 2'-deoxythymidine
  source 1..21: mol_type = other RNA
gaccagtacatgaggactgtt

SEQ ID NO: 1144 - RNA, 21 nt, synthetic construct
  modified_base 20..21: mod_base = OTHER; note = thymine
  modified_base 1: mod_base = OTHER; note = adenosine
  modified_base 2: mod_base = cm
  modified_base 3: mod_base = cm
  modified_base 4: mod_base = OTHER; note = adenosine
  modified_base 5: mod_base = OTHER; note = guanosine
  modified_base 6: mod_base = um
  modified_base 7: mod_base = OTHER; note = adenosine
  modified_base 8: mod_base = cm
  modified_base 9: mod_base = OTHER; note = adenosine
  modified_base 10: mod_base = um
  modified_base 11: mod_base = OTHER; note = guanosine
  modified_base 12: mod_base = OTHER; note = adenosine
  modified_base 13: mod_base = OTHER; note = guanosine
  modified_base 14: mod_base = OTHER; note = guanosine
  modified_base 15: mod_base = OTHER; note = adenosine
  modified_base 16: mod_base = cm
  modified_base 17: mod_base = um
  modified_base 18: mod_base = OTHER; note = guanosine
  modified_base 19: mod_base = OTHER; note = guanosine
  modified_base 20: mod_base = OTHER; note = 2'-deoxythymidine
  modified_base 21: mod_base = OTHER; note = 2'-deoxythymidine
  source 1..21: mol_type = other RNA
accagtacatgaggactggtt

SEQ ID NO: 1145 - RNA, 21 nt, synthetic construct
  modified_base 20..21: mod_base = OTHER; note = thymine
  modified_base 1: mod_base = cm
  modified_base 2: mod_base = cm
  modified_base 3: mod_base = OTHER; note = adenosine
  modified_base 4: mod_base = OTHER; note = guanosine
  modified_base 5: mod_base = um
  modified_base 6: mod_base = OTHER; note = adenosine
  modified_base 7: mod_base = cm
  modified_base 8: mod_base = OTHER; note = adenosine
  modified_base 9: mod_base = um
  modified_base 10: mod_base = OTHER; note = guanosine
  modified_base 11: mod_base = OTHER; note = adenosine
  modified_base 12: mod_base = OTHER; note = guanosine
  modified_base 13: mod_base = OTHER; note = guanosine
  modified_base 14: mod_base = OTHER; note = adenosine
  modified_base 15: mod_base = cm
  modified_base 16: mod_base = um
  modified_base 17: mod_base = OTHER; note = guanosine
  modified_base 18: mod_base = OTHER; note = guanosine
  modified_base 19: mod_base = OTHER; note = guanosine
  modified_base 20: mod_base = OTHER; note = 2'-deoxythymidine
  modified_base 21: mod_base = OTHER; note = 2'-deoxythymidine
  source 1..21: mol_type = other RNA
ccagtacatgaggactgggtt

SEQ ID NO: 1146 - RNA, 21 nt, synthetic construct
  modified_base 20..21: mod_base = OTHER; note = thymine
  modified_base 1: mod_base = cm
  modified_base 2: mod_base = OTHER; note = adenosine
  modified_base 3: mod_base = OTHER; note = guanosine
  modified_base 4: mod_base = um
  modified_base 5: mod_base = OTHER; note = adenosine
  modified_base 6: mod_base = cm
  modified_base 7: mod_base = OTHER; note = adenosine
  modified_base 8: mod_base = um
  modified_base 9: mod_base = OTHER; note = guanosine
  modified_base 10: mod_base = OTHER; note = adenosine
  modified_base 11: mod_base = OTHER; note = guanosine
  modified_base 12: mod_base = OTHER; note = guanosine
  modified_base 13: mod_base = OTHER; note = adenosine
  modified_base 14: mod_base = cm
  modified_base 15: mod_base = um
  modified_base 16: mod_base = OTHER; note = guanosine
  modified_base 17: mod_base = OTHER; note = guanosine
  modified_base 18: mod_base = OTHER; note = guanosine
  modified_base 19: mod_base = OTHER; note = guanosine
  modified_base 20: mod_base = OTHER; note = 2'-deoxythymidine
  modified_base 21: mod_base = OTHER; note = 2'-deoxythymidine
  source 1..21: mol_type = other RNA
cagtacatgaggactggggtt

SEQ ID NO: 1147 - RNA, 21 nt, synthetic construct
  modified_base 20..21: mod_base = OTHER; note = thymine
  modified_base 1: mod_base = OTHER; note = adenosine
  modified_base 2: mod_base = OTHER; note = guanosine
  modified_base 3: mod_base = um
  modified_base 4: mod_base = OTHER; note = adenosine
  modified_base 5: mod_base = cm
  modified_base 6: mod_base = OTHER; note = adenosine
  modified_base 7: mod_base = um
  modified_base 8: mod_base = OTHER; note = guanosine
  modified_base 9: mod_base = OTHER; note = adenosine
  modified_base 10: mod_base = OTHER; note = guanosine
  modified_base 11: mod_base = OTHER; note = guanosine
  modified_base 12: mod_base = OTHER; note = adenosine
  modified_base 13: mod_base = cm
  modified_base 14: mod_base = um
  modified_base 15: mod_base = OTHER; note = guanosine
  modified_base 16: mod_base = OTHER; note = guanosine
  modified_base 17: mod_base = OTHER; note = guanosine
  modified_base 18: mod_base = OTHER; note = guanosine
  modified_base 19: mod_base = OTHER; note = adenosine
  modified_base 20: mod_base = OTHER; note = 2'-deoxythymidine
  modified_base 21: mod_base = OTHER; note = 2'-deoxythymidine
  source 1..21: mol_type = other RNA
agtacatgaggactggggatt

SEQ ID NO: 1148 - RNA, 21 nt, synthetic construct
  modified_base 20..21: mod_base = OTHER; note = thymine
  modified_base 1: mod_base = OTHER; note = guanosine
  modified_base 2: mod_base = um
  modified_base 3: mod_base = OTHER; note = adenosine
  modified_base 4: mod_base = cm
  modified_base 5: mod_base = OTHER; note = adenosine
  modified_base 6: mod_base = um
  modified_base 7: mod_base = OTHER; note = guanosine
  modified_base 8: mod_base = OTHER; note = adenosine
  modified_base 9: mod_base = OTHER; note = guanosine
  modified_base 10: mod_base = OTHER; note = guanosine
  modified_base 11: mod_base = OTHER; note = adenosine
  modified_base 12: mod_base = cm
  modified_base 13: mod_base = um
  modified_base 14: mod_base = OTHER; note = guanosine
  modified_base 15: mod_base = OTHER; note = guanosine
  modified_base 16: mod_base = OTHER; note = guanosine
  modified_base 17: mod_base = OTHER; note = guanosine
  modified_base 18: mod_base = OTHER; note = adenosine
  modified_base 19: mod_base = OTHER; note = guanosine
  modified_base 20: mod_base = OTHER; note = 2'-deoxythymidine
  modified_base 21: mod_base = OTHER; note = 2'-deoxythymidine
  source 1..21: mol_type = other RNA
gtacatgaggactggggagtt

SEQ ID NO: 1149 - RNA, 21 nt, synthetic construct
  modified_base 20..21: mod_base = OTHER; note = thymine
  modified_base 1: mod_base = um
  modified_base 2: mod_base = OTHER; note = adenosine
  modified_base 3: mod_base = cm
  modified_base 4: mod_base = OTHER; note = adenosine
  modified_base 5: mod_base = um
  modified_base 6: mod_base = OTHER; note = guanosine
  modified_base 7: mod_base = OTHER; note = adenosine
  modified_base 8: mod_base = OTHER; note = guanosine
  modified_base 9: mod_base = OTHER; note = guanosine
  modified_base 10: mod_base = OTHER; note = adenosine
  modified_base 11: mod_base = cm
  modified_base 12: mod_base = um
  modified_base 13: mod_base = OTHER; note = guanosine
  modified_base 14: mod_base = OTHER; note = guanosine
  modified_base 15: mod_base = OTHER; note = guanosine
  modified_base 16: mod_base = OTHER; note = guanosine
  modified_base 17: mod_base = OTHER; note = adenosine
  modified_base 18: mod_base = OTHER; note = guanosine
  modified_base 19: mod_base = OTHER; note = guanosine
  modified_base 20: mod_base = OTHER; note = 2'-deoxythymidine
  modified_base 21: mod_base = OTHER; note = 2'-deoxythymidine
  source 1..21: mol_type = other RNA
tacatgaggactggggaggtt

SEQ ID NO: 1150 - RNA, 21 nt, synthetic construct
  modified_base 20..21: mod_base = OTHER; note = thymine
  modified_base 1: mod_base = OTHER; note = adenosine
  modified_base 2: mod_base = cm
  modified_base 3: mod_base = OTHER; note = adenosine
  modified_base 4: mod_base = um
  modified_base 5: mod_base = OTHER; note = guanosine
  modified_base 6: mod_base = OTHER; note = adenosine
  modified_base 7: mod_base = OTHER; note = guanosine
  modified_base 8: mod_base = OTHER; note = guanosine
  modified_base 9: mod_base = OTHER; note = adenosine
  modified_base 10: mod_base = cm
  modified_base 11: mod_base = um
  modified_base 12: mod_base = OTHER; note = guanosine
  modified_base 13: mod_base = OTHER; note = guanosine
  modified_base 14: mod_base = OTHER; note = guanosine
  modified_base 15: mod_base = OTHER; note = guanosine
  modified_base 16: mod_base = OTHER; note = adenosine
  modified_base 17: mod_base = OTHER; note = guanosine
  modified_base 18: mod_base = OTHER; note = guanosine
  modified_base 19: mod_base = OTHER; note = guanosine
  modified_base 20: mod_base = OTHER; note = 2'-deoxythymidine
  modified_base 21: mod_base = OTHER; note = 2'-deoxythymidine
  source 1..21: mol_type = other RNA
acatgaggactggggagggtt

SEQ ID NO: 1151 - RNA, 21 nt, synthetic construct
  modified_base 20..21: mod_base = OTHER; note = thymine
  modified_base 1: mod_base = cm
  modified_base 2: mod_base = OTHER; note = adenosine
  modified_base 3: mod_base = um
  modified_base 4: mod_base = OTHER; note = guanosine
  modified_base 5: mod_base = OTHER; note = adenosine
  modified_base 6: mod_base = OTHER; note = guanosine
  modified_base 7: mod_base = OTHER; note = guanosine
  modified_base 8: mod_base = OTHER; note = adenosine
  modified_base 9: mod_base = cm
  modified_base 10: mod_base = um
  modified_base 11: mod_base = OTHER; note = guanosine
  modified_base 12: mod_base = OTHER; note = guanosine
  modified_base 13: mod_base = OTHER; note = guanosine
  modified_base 14: mod_base = OTHER; note = guanosine
  modified_base 15: mod_base = OTHER; note = adenosine
  modified_base 16: mod_base = OTHER; note = guanosine
  modified_base 17: mod_base = OTHER; note = guanosine
  modified_base 18: mod_base = OTHER; note = guanosine
  modified_base 19: mod_base = cm
  modified_base 20: mod_base = OTHER; note = 2'-deoxythymidine
  modified_base 21: mod_base = OTHER; note = 2'-deoxythymidine
  source 1..21: mol_type = other RNA
catgaggactggggagggctt

SEQ ID NO: 1152 - RNA, 21 nt, synthetic construct
  modified_base 20..21: mod_base = OTHER; note = thymine
  modified_base 1: mod_base = OTHER; note = adenosine
  modified_base 2: mod_base = um
  modified_base 3: mod_base = OTHER; note = guanosine
  modified_base 4: mod_base = OTHER; note = adenosine
  modified_base 5: mod_base = OTHER; note = guanosine
  modified_base 6: mod_base = OTHER; note = guanosine
  modified_base 7: mod_base = OTHER; note = adenosine
  modified_base 8: mod_base = cm
  modified_base 9: mod_base = um
  modified_base 10: mod_base = OTHER; note = guanosine
  modified_base 11: mod_base = OTHER; note = guanosine
  modified_base 12: mod_base = OTHER; note = guanosine
  modified_base 13: mod_base = OTHER; note = guanosine
  modified_base 14: mod_base = OTHER; note = adenosine
  modified_base 15: mod_base = OTHER; note = guanosine
  modified_base 16: mod_base = OTHER; note = guanosine
  modified_base 17: mod_base = OTHER; note = guanosine
  modified_base 18: mod_base = cm
  modified_base 19: mod_base = um
  modified_base 20: mod_base = OTHER; note = 2'-deoxythymidine
  modified_base 21: mod_base = OTHER; note = 2'-deoxythymidine
  source 1..21: mol_type = other RNA
atgaggactggggagggcttt

SEQ ID NO: 1153 - RNA, 21 nt, synthetic construct
  modified_base 20..21: mod_base = OTHER; note = thymine
  modified_base 1: mod_base = um
  modified_base 2: mod_base = OTHER; note = guanosine
  modified_base 3: mod_base = OTHER; note = adenosine
  modified_base 4: mod_base = OTHER; note = guanosine
  modified_base 5: mod_base = OTHER; note = guanosine
  modified_base 6: mod_base = OTHER; note = adenosine
  modified_base 7: mod_base = cm
  modified_base 8: mod_base = um
  modified_base 9: mod_base = OTHER; note = guanosine
  modified_base 10: mod_base = OTHER; note = guanosine
  modified_base 11: mod_base = OTHER; note = guanosine
  modified_base 12: mod_base = OTHER; note = guanosine
  modified_base 13: mod_base = OTHER; note = adenosine
  modified_base 14: mod_base = OTHER; note = guanosine
  modified_base 15: mod_base = OTHER; note = guanosine
  modified_base 16: mod_base = OTHER; note = guanosine
  modified_base 17: mod_base = cm
  modified_base 18: mod_base = um
  modified_base 19: mod_base = um
  modified_base 20: mod_base = OTHER; note = 2'-deoxythymidine
  modified_base 21: mod_base = OTHER; note = 2'-deoxythymidine
  source 1..21: mol_type = other RNA
tgaggactggggagggctttt

SEQ ID NO: 1154 - RNA, 21 nt, synthetic construct
  modified_base 1: mod_base = OTHER; note = guanosine
  modified_base 2: mod_base = OTHER; note = adenosine
  modified_base 3: mod_base = OTHER; note = guanosine
  modified_base 4: mod_base = OTHER; note = guanosine
  modified_base 5: mod_base = OTHER; note = adenosine
  modified_base 6: mod_base = cm
  modified_base 7: mod_base = um
  modified_base 8: mod_base = OTHER; note = guanosine
  modified_base 9: mod_base = OTHER; note = guanosine
  modified_base 10: mod_base = OTHER; note = guanosine
  modified_base 11: mod_base = OTHER; note = guanosine
  modified_base 12: mod_base = OTHER; note = adenosine
  modified_base 13: mod_base = OTHER; note = guanosine
  modified_base 14: mod_base = OTHER; note = guanosine
  modified_base 15: mod_base = OTHER; note = guanosine
  modified_base 16: mod_base = cm
  modified_base 17: mod_base = um
  modified_base 18: mod_base = um
  modified_base 19: mod_base = um
  modified_base 20: mod_base = OTHER; note = 2'-deoxythymidine
  modified_base 21: mod_base = OTHER; note = 2'-deoxythymidine
  source 1..21: mol_type = other RNA
  modified_base 20..21: mod_base = OTHER; note = thymine
gaggactggggagggcttttt

SEQ ID NO: 1155 - RNA, 21 nt, synthetic construct
  modified_base 20..21: mod_base = OTHER; note = thymine
  modified_base 1: mod_base = OTHER; note = adenosine
  modified_base 2: mod_base = OTHER; note = guanosine
  modified_base 3: mod_base = OTHER; note = guanosine
  modified_base 4: mod_base = OTHER; note = adenosine
  modified_base 5: mod_base = cm
  modified_base 6: mod_base = um
  modified_base 7: mod_base = OTHER; note = guanosine
  modified_base 8: mod_base = OTHER; note = guanosine
  modified_base 9: mod_base = OTHER; note = guanosine
  modified_base 10: mod_base = OTHER; note = guanosine
  modified_base 11: mod_base = OTHER; note = adenosine
  modified_base 12: mod_base = OTHER; note = guanosine
  modified_base 13: mod_base = OTHER; note = guanosine
  modified_base 14: mod_base = OTHER; note = guanosine
  modified_base 15: mod_base = cm
  modified_base 16: mod_base = um
  modified_base 17: mod_base = um
  modified_base 18: mod_base = um
  modified_base 19: mod_base = cm
  modified_base 20: mod_base = OTHER; note = 2'-deoxythymidine
  modified_base 21: mod_base = OTHER; note = 2'-deoxythymidine
  source 1..21: mol_type = other RNA
aggactggggagggctttctt

SEQ ID NO: 1156 - RNA, 21 nt, synthetic construct
  modified_base 20..21: mod_base = OTHER; note = thymine
  modified_base 1: mod_base = OTHER; note = guanosine
  modified_base 2: mod_base = OTHER; note = guanosine
  modified_base 3: mod_base = OTHER; note = adenosine
  modified_base 4: mod_base = cm
  modified_base 5: mod_base = um
  modified_base 6: mod_base = OTHER; note = guanosine
  modified_base 7: mod_base = OTHER; note = guanosine
  modified_base 8: mod_base = OTHER; note = guanosine
  modified_base 9: mod_base = OTHER; note = guanosine
  modified_base 10: mod_base = OTHER; note = adenosine
  modified_base 11: mod_base = OTHER; note = guanosine
  modified_base 12: mod_base = OTHER; note = guanosine
  modified_base 13: mod_base = OTHER; note = guanosine
  modified_base 14: mod_base = cm
  modified_base 15: mod_base = um
  modified_base 16: mod_base = um
  modified_base 17: mod_base = um
  modified_base 18: mod_base = cm
  modified_base 19: mod_base = um
  modified_base 20: mod_base = OTHER; note = 2'-deoxythymidine
  modified_base 21: mod_base = OTHER; note = 2'-deoxythymidine
  source 1..21: mol_type = other RNA
ggactggggagggctttcttt

SEQ ID NO: 1157 - RNA, 21 nt, synthetic construct
  modified_base 20..21: mod_base = OTHER; note = thymine
  modified_base 1: mod_base = OTHER; note = guanosine
  modified_base 2: mod_base = OTHER; note = adenosine
  modified_base 3: mod_base = cm
  modified_base 4: mod_base = um
  modified_base 5: mod_base = OTHER; note = guanosine
  modified_base 6: mod_base = OTHER; note = guanosine
  modified_base 7: mod_base = OTHER; note = guanosine
  modified_base 8: mod_base = OTHER; note = guanosine
  modified_base 9: mod_base = OTHER; note = adenosine
  modified_base 10: mod_base = OTHER; note = guanosine
  modified_base 11: mod_base = OTHER; note = guanosine
  modified_base 12: mod_base = OTHER; note = guanosine
  modified_base 13: mod_base = cm
  modified_base 14: mod_base = um
  modified_base 15: mod_base = um
  modified_base 16: mod_base = um
  modified_base 17: mod_base = cm
  modified_base 18: mod_base = um
  modified_base 19: mod_base = um
  modified_base 20: mod_base = OTHER; note = 2'-deoxythymidine
  modified_base 21: mod_base = OTHER; note = 2'-deoxythymidine
  source 1..21: mol_type = other RNA
gactggggagggctttctttt

SEQ ID NO: 1158 - RNA, 21 nt, synthetic construct
  modified_base 20..21: mod_base = OTHER; note = thymine
  modified_base 1: mod_base = OTHER; note = adenosine
  modified_base 2: mod_base = cm
  modified_base 3: mod_base = um
  modified_base 4: mod_base = OTHER; note = guanosine
  modified_base 5: mod_base = OTHER; note = guanosine
  modified_base 6: mod_base = OTHER; note = guanosine
  modified_base 7: mod_base = OTHER; note = guanosine
  modified_base 8: mod_base = OTHER; note = adenosine
  modified_base 9: mod_base = OTHER; note = guanosine
  modified_base 10: mod_base = OTHER; note = guanosine
  modified_base 11: mod_base = OTHER; note = guanosine
  modified_base 12: mod_base = cm
  modified_base 13: mod_base = um
  modified_base 14: mod_base = um
  modified_base 15: mod_base = um
  modified_base 16: mod_base = cm
  modified_base 17: mod_base = um
  modified_base 18: mod_base = um
  modified_base 19: mod_base = um
  modified_base 20: mod_base = OTHER; note = 2'-deoxythymidine
  modified_base 21: mod_base = OTHER; note = 2'-deoxythymidine
  source 1..21: mol_type = other RNA
actggggagggctttcttttt

SEQ ID NO: 1159 - RNA, 21 nt, synthetic construct
  modified_base 20..21: mod_base = OTHER; note = thymine
  modified_base 1: mod_base = cm
  modified_base 2: mod_base = um
  modified_base 3: mod_base = OTHER; note = guanosine
  modified_base 4: mod_base = OTHER; note = guanosine
  modified_base 5: mod_base = OTHER; note = guanosine
  modified_base 6: mod_base = OTHER; note = guanosine
  modified_base 7: mod_base = OTHER; note = adenosine
  modified_base 8: mod_base = OTHER; note = guanosine
  modified_base 9: mod_base = OTHER; note = guanosine
  modified_base 10: mod_base = OTHER; note = guanosine
  modified_base 11: mod_base = cm
  modified_base 12: mod_base = um
  modified_base 13: mod_base = um
  modified_base 14: mod_base = um
  modified_base 15: mod_base = cm
  modified_base 16: mod_base = um
  modified_base 17: mod_base = um
  modified_base 18: mod_base = um
  modified_base 19: mod_base = OTHER; note = guanosine
  modified_base 20: mod_base = OTHER; note = 2'-deoxythymidine
  modified_base 21: mod_base = OTHER; note = 2'-deoxythymidine
  source 1..21: mol_type = other RNA
ctggggagggctttctttgtt

SEQ ID NO: 1160 - RNA, 21 nt, synthetic construct
  modified_base 20..21: mod_base = OTHER; note = thymine
  modified_base 1: mod_base = um
  modified_base 2: mod_base = OTHER; note = guanosine
  modified_base 3: mod_base = OTHER; note = guanosine
  modified_base 4: mod_base = OTHER; note = guanosine
  modified_base 5: mod_base = OTHER; note = guanosine
  modified_base 6: mod_base = OTHER; note = adenosine
  modified_base 7: mod_base = OTHER; note = guanosine
  modified_base 8: mod_base = OTHER; note = guanosine
  modified_base 9: mod_base = OTHER; note = guanosine
  modified_base 10: mod_base = cm
  modified_base 11: mod_base = um
  modified_base 12: mod_base = um
  modified_base 13: mod_base = um
  modified_base 14: mod_base = cm
  modified_base 15: mod_base = um
  modified_base 16: mod_base = um
  modified_base 17: mod_base = um
  modified_base 18: mod_base = OTHER; note = guanosine
  modified_base 19: mod_base = um
  modified_base 20: mod_base = OTHER; note = 2'-deoxythymidine
  modified_base 21: mod_base = OTHER; note = 2'-deoxythymidine
  source 1..21: mol_type = other RNA
tggggagggctttctttgttt

SEQ ID NO: 1161 - RNA, 21 nt, synthetic construct
  modified_base 20..21: mod_base = OTHER; note = thymine
  modified_base 1: mod_base = um
  modified_base 2: mod_base = um
  modified_base 3: mod_base = OTHER; note = guanosine
  modified_base 4: mod_base = cm
  modified_base 5: mod_base = cm
  modified_base 6: mod_base = OTHER; note = adenosine
  modified_base 7: mod_base = um
  modified_base 8: mod_base = OTHER; note = adenosine
  modified_base 9: mod_base = OTHER; note = adenosine
  modified_base 10: mod_base = OTHER; note = adenosine
  modified_base 11: mod_base = um
  modified_base 12: mod_base = OTHER; note = adenosine
  modified_base 13: mod_base = OTHER; note = adenosine
  modified_base 14: mod_base = um
  modified_base 15: mod_base = OTHER; note = adenosine
  modified_base 16: mod_base = cm
  modified_base 17: mod_base = um
  modified_base 18: mod_base = OTHER; note = adenosine
  modified_base 19: mod_base = OTHER; note = adenosine
  modified_base 20: mod_base = OTHER; note = 2'-deoxythymidine
  modified_base 21: mod_base = OTHER; note = 2'-deoxythymidine
  source 1..21: mol_type = other RNA
ttgccataaataatactaatt

SEQ ID NO: 1162 - RNA, 21 nt, synthetic construct
  modified_base 20..21: mod_base = OTHER; note = thymine
  modified_base 1: mod_base = um
  modified_base 2: mod_base = OTHER; note = guanosine
  modified_base 3: mod_base = cm
  modified_base 4: mod_base = cm
  modified_base 5: mod_base = OTHER; note = adenosine
  modified_base 6: mod_base = um
  modified_base 7: mod_base = OTHER; note = adenosine
  modified_base 8: mod_base = OTHER; note = adenosine
  modified_base 9: mod_base = OTHER; note = adenosine
  modified_base 10: mod_base = um
  modified_base 11: mod_base = OTHER; note = adenosine
  modified_base 12: mod_base = OTHER; note = adenosine
  modified_base 13: mod_base = um
  modified_base 14: mod_base = OTHER; note = adenosine
  modified_base 15: mod_base = cm
  modified_base 16: mod_base = um
  modified_base 17: mod_base = OTHER; note = adenosine
  modified_base 18: mod_base = OTHER; note = adenosine
  modified_base 19: mod_base = OTHER; note = adenosine
  modified_base 20: mod_base = OTHER; note = 2'-deoxythymidine
  modified_base 21: mod_base = OTHER; note = 2'-deoxythymidine
  source 1..21: mol_type = other RNA
tgccataaataatactaaatt

SEQ ID NO: 1163 - RNA, 21 nt, synthetic construct
  modified_base 20..21: mod_base = OTHER; note = thymine
  modified_base 1: mod_base = OTHER; note = guanosine
  modified_base 2: mod_base = cm
  modified_base 3: mod_base = cm
  modified_base 4: mod_base = OTHER; note = adenosine
  modified_base 5: mod_base = um
  modified_base 6: mod_base = OTHER; note = adenosine
  modified_base 7: mod_base = OTHER; note = adenosine
  modified_base 8: mod_base = OTHER; note = adenosine
  modified_base 9: mod_base = um
  modified_base 10: mod_base = OTHER; note = adenosine
  modified_base 11: mod_base = OTHER; note = adenosine
  modified_base 12: mod_base = um
  modified_base 13: mod_base = OTHER; note = adenosine
  modified_base 14: mod_base = cm
  modified_base 15: mod_base = um
  modified_base 16: mod_base = OTHER; note = adenosine
  modified_base 17: mod_base = OTHER; note = adenosine
  modified_base 18: mod_base = OTHER; note = adenosine
  modified_base 19: mod_base = um
  modified_base 20: mod_base = OTHER; note = 2'-deoxythymidine
  modified_base 21: mod_base = OTHER; note = 2'-deoxythymidine
  source 1..21: mol_type = other RNA
gccataaataatactaaattt

SEQ ID NO: 1164 - RNA, 21 nt, synthetic construct
  modified_base 20..21: mod_base = OTHER; note = thymine
  modified_base 1: mod_base = cm
  modified_base 2: mod_base = cm
  modified_base 3: mod_base = OTHER; note = adenosine
  modified_base 4: mod_base = um
  modified_base 5: mod_base = OTHER; note = adenosine
  modified_base 6: mod_base = OTHER; note = adenosine
  modified_base 7: mod_base = OTHER; note = adenosine
  modified_base 8: mod_base = um
  modified_base 9: mod_base = OTHER; note = adenosine
  modified_base 10: mod_base = OTHER; note = adenosine
  modified_base 11: mod_base = um
  modified_base 12: mod_base = OTHER; note = adenosine
  modified_base 13: mod_base = cm
  modified_base 14: mod_base = um
  modified_base 15: mod_base = OTHER; note = adenosine
  modified_base 16: mod_base = OTHER; note = adenosine
  modified_base 17: mod_base = OTHER; note = adenosine
  modified_base 18: mod_base = um
  modified_base 19: mod_base = cm
  modified_base 20: mod_base = OTHER; note = 2'-deoxythymidine
  modified_base 21: mod_base = OTHER; note = 2'-deoxythymidine
  source 1..21: mol_type = other RNA
ccataaataatactaaatctt

SEQ ID NO: 1165 - RNA, 21 nt, synthetic construct
  modified_base 20..21: mod_base = OTHER; note = thymine
  modified_base 1: mod_base = cm
  modified_base 2: mod_base = OTHER; note = adenosine
  modified_base 3: mod_base = um
  modified_base 4: mod_base = OTHER; note = adenosine
  modified_base 5: mod_base = OTHER; note = adenosine
  modified_base 6: mod_base = OTHER; note = adenosine
  modified_base 7: mod_base = um
  modified_base 8: mod_base = OTHER; note = adenosine
  modified_base 9: mod_base = OTHER; note = adenosine
  modified_base 10: mod_base = um
  modified_base 11: mod_base = OTHER; note = adenosine
  modified_base 12: mod_base = cm
  modified_base 13: mod_base = um
  modified_base 14: mod_base = OTHER; note = adenosine
  modified_base 15: mod_base = OTHER; note = adenosine
  modified_base 16: mod_base = OTHER; note = adenosine
  modified_base 17: mod_base = um
  modified_base 18: mod_base = cm
  modified_base 19: mod_base = OTHER; note = adenosine
  modified_base 20: mod_base = OTHER; note = 2'-deoxythymidine
  modified_base 21: mod_base = OTHER; note = 2'-deoxythymidine
  source 1..21: mol_type = other RNA
cataaataatactaaatcatt

SEQ ID NO: 1166 - RNA, 21 nt, synthetic construct
  modified_base 20..21: mod_base = OTHER; note = thymine
  modified_base 1: mod_base = OTHER; note = adenosine
  modified_base 2: mod_base = um
  modified_base 3: mod_base = OTHER; note = adenosine
  modified_base 4: mod_base = OTHER; note = adenosine
  modified_base 5: mod_base = OTHER; note = adenosine
  modified_base 6: mod_base = um
  modified_base 7: mod_base = OTHER; note = adenosine
  modified_base 8: mod_base = OTHER; note = adenosine
  modified_base 9: mod_base = um
  modified_base 10: mod_base = OTHER; note = adenosine
  modified_base 11: mod_base = cm
  modified_base 12: mod_base = um
  modified_base 13: mod_base = OTHER; note = adenosine
  modified_base 14: mod_base = OTHER; note = adenosine
  modified_base 15: mod_base = OTHER; note = adenosine
  modified_base 16: mod_base = um
  modified_base 17: mod_base = cm
  modified_base 18: mod_base = OTHER; note = adenosine
  modified_base 19: mod_base = um
  modified_base 20: mod_base = OTHER; note = 2'-deoxythymidine
  modified_base 21: mod_base = OTHER; note = 2'-deoxythymidine
  source 1..21: mol_type = other RNA
ataaataatactaaatcattt

SEQ ID NO: 1167 - RNA, 21 nt, synthetic construct
  modified_base 20..21: mod_base = OTHER; note = thymine
  modified_base 1: mod_base = um
  modified_base 2: mod_base = OTHER; note = adenosine
  modified_base 3: mod_base = OTHER; note = adenosine
  modified_base 4: mod_base = OTHER; note = adenosine
  modified_base 5: mod_base = um
  modified_base 6: mod_base = OTHER; note = adenosine
  modified_base 7: mod_base = OTHER; note = adenosine
  modified_base 8: mod_base = um
  modified_base 9: mod_base = OTHER; note = adenosine
  modified_base 10: mod_base = cm
  modified_base 11: mod_base = um
  modified_base 12: mod_base = OTHER; note = adenosine
  modified_base 13: mod_base = OTHER; note = adenosine
  modified_base 14: mod_base = OTHER; note = adenosine
  modified_base 15: mod_base = um
  modified_base 16: mod_base = cm
  modified_base 17: mod_base = OTHER; note = adenosine
  modified_base 18: mod_base = um
  modified_base 19: mod_base = um
  modified_base 20: mod_base = OTHER; note = 2'-deoxythymidine
  modified_base 21: mod_base = OTHER; note = 2'-deoxythymidine
  source 1..21: mol_type = other RNA
taaataatactaaatcatttt

SEQ ID NO: 1168 - RNA, 21 nt, synthetic construct
  modified_base 20..21: mod_base = OTHER; note = thymine
  modified_base 1: mod_base = OTHER; note = adenosine
  modified_base 2: mod_base = OTHER; note = adenosine
  modified_base 3: mod_base = OTHER; note = adenosine
  modified_base 4: mod_base = um
  modified_base 5: mod_base = OTHER; note = adenosine
  modified_base 6: mod_base = OTHER; note = adenosine
  modified_base 7: mod_base = um
  modified_base 8: mod_base = OTHER; note = adenosine
  modified_base 9: mod_base = cm
  modified_base 10: mod_base = um
  modified_base 11: mod_base = OTHER; note = adenosine
  modified_base 12: mod_base = OTHER; note = adenosine
  modified_base 13: mod_base = OTHER; note = adenosine
  modified_base 14: mod_base = um
  modified_base 15: mod_base = cm
  modified_base 16: mod_base = OTHER; note = adenosine
  modified_base 17: mod_base = um
  modified_base 18: mod_base = um
  modified_base 19: mod_base = um
  modified_base 20: mod_base = OTHER; note = 2'-deoxythymidine
  modified_base 21: mod_base = OTHER; note = 2'-deoxythymidine
  source 1..21: mol_type = other RNA
aaataatactaaatcattttt

SEQ ID NO: 1169 - RNA, 21 nt, synthetic construct
  modified_base 20..21: mod_base = OTHER; note = thymine
  modified_base 1: mod_base = OTHER; note = adenosine
  modified_base 2: mod_base = OTHER; note = adenosine
  modified_base 3: mod_base = um
  modified_base 4: mod_base = OTHER; note = adenosine
  modified_base 5: mod_base = OTHER; note = adenosine
  modified_base 6: mod_base = um
  modified_base 7: mod_base = OTHER; note = adenosine
  modified_base 8: mod_base = cm
  modified_base 9: mod_base = um
  modified_base 10: mod_base = OTHER; note = adenosine
  modified_base 11: mod_base = OTHER; note = adenosine
  modified_base 12: mod_base = OTHER; note = adenosine
  modified_base 13: mod_base = um
  modified_base 14: mod_base = cm
  modified_base 15: mod_base = OTHER; note = adenosine
  modified_base 16: mod_base = um
  modified_base 17: mod_base = um
  modified_base 18: mod_base = um
  modified_base 19: mod_base = OTHER; note = guanosine
  modified_base 20: mod_base = OTHER; note = 2'-deoxythymidine
  modified_base 21: mod_base = OTHER; note = 2'-deoxythymidine
  source 1..21: mol_type = other RNA
aataatactaaatcatttgtt

SEQ ID NO: 1170 - RNA, 21 nt, synthetic construct
  modified_base 20..21: mod_base = OTHER; note = thymine
  modified_base 1: mod_base = OTHER; note = adenosine
  modified_base 2: mod_base = um
  modified_base 3: mod_base = OTHER; note = adenosine
  modified_base 4: mod_base = OTHER; note = adenosine
  modified_base 5: mod_base = um
  modified_base 6: mod_base = OTHER; note = adenosine
  modified_base 7: mod_base = cm
  modified_base 8: mod_base = um
  modified_base 9: mod_base = OTHER; note = adenosine
  modified_base 10: mod_base = OTHER; note = adenosine
  modified_base 11: mod_base = OTHER; note = adenosine
  modified_base 12: mod_base = um
  modified_base 13: mod_base = cm
  modified_base 14: mod_base = OTHER; note = adenosine
  modified_base 15: mod_base = um
  modified_base 16: mod_base = um
  modified_base 17: mod_base = um
  modified_base 18: mod_base = OTHER; note = guanosine
  modified_base 19: mod_base = OTHER; note = adenosine
  modified_base 20: mod_base = OTHER; note = 2'-deoxythymidine
  modified_base 21: mod_base = OTHER; note = 2'-deoxythymidine
  source 1..21: mol_type = other RNA
ataatactaaatcatttgatt

SEQ ID NO: 1171 - RNA, 21 nt, synthetic construct
  modified_base 20..21: mod_base = OTHER; note = thymine
  modified_base 1: mod_base = um
  modified_base 2: mod_base = OTHER; note = adenosine
  modified_base 3: mod_base = OTHER; note = adenosine
  modified_base 4: mod_base = um
  modified_base 5: mod_base = OTHER; note = adenosine
  modified_base 6: mod_base = cm
  modified_base 7: mod_base = um
  modified_base 8: mod_base = OTHER; note = adenosine
  modified_base 9: mod_base = OTHER; note = adenosine
  modified_base 10: mod_base = OTHER; note = adenosine
  modified_base 11: mod_base = um
  modified_base 12: mod_base = cm
  modified_base 13: mod_base = OTHER; note = adenosine
  modified_base 14: mod_base = um
  modified_base 15: mod_base = um
  modified_base 16: mod_base = um
  modified_base 17: mod_base = OTHER; note = guanosine
  modified_base 18: mod_base = OTHER; note = adenosine
  modified_base 19: mod_base = OTHER; note = adenosine
  modified_base 20: mod_base = OTHER; note = 2'-deoxythymidine
  modified_base 21: mod_base = OTHER; note = 2'-deoxythymidine
  source 1..21: mol_type = other RNA
taatactaaatcatttgaatt

SEQ ID NO: 1172 - RNA, 21 nt, synthetic construct
  modified_base 20..21: mod_base = OTHER; note = thymine
  modified_base 1: mod_base = OTHER; note = adenosine
  modified_base 2: mod_base = OTHER; note = adenosine
  modified_base 3: mod_base = um
  modified_base 4: mod_base = OTHER; note = adenosine
  modified_base 5: mod_base = cm
  modified_base 6: mod_base = um
  modified_base 7: mod_base = OTHER; note = adenosine
  modified_base 8: mod_base = OTHER; note = adenosine
  modified_base 9: mod_base = OTHER; note = adenosine
  modified_base 10: mod_base = um
  modified_base 11: mod_base = cm
  modified_base 12: mod_base = OTHER; note = adenosine
  modified_base 13: mod_base = um
  modified_base 14: mod_base = um
  modified_base 15: mod_base = um
  modified_base 16: mod_base = OTHER; note = guanosine
  modified_base 17: mod_base = OTHER; note = adenosine
  modified_base 18: mod_base = OTHER; note = adenosine
  modified_base 19: mod_base = OTHER; note = guanosine
  modified_base 20: mod_base = OTHER; note = 2'-deoxythymidine
  modified_base 21: mod_base = OTHER; note = 2'-deoxythymidine
  source 1..21: mol_type = other RNA
aatactaaatcatttgaagtt

SEQ ID NO: 1173 - RNA, 21 nt, synthetic construct
  modified_base 20..21: mod_base = OTHER; note = thymine
  modified_base 1: mod_base = OTHER; note = adenosine
  modified_base 2: mod_base = um
  modified_base 3: mod_base = OTHER; note = adenosine
  modified_base 4: mod_base = cm
  modified_base 5: mod_base = um
  modified_base 6: mod_base = OTHER; note = adenosine
  modified_base 7: mod_base = OTHER; note = adenosine
  modified_base 8: mod_base = OTHER; note = adenosine
  modified_base 9: mod_base = um
  modified_base 10: mod_base = cm
  modified_base 11: mod_base = OTHER; note = adenosine
  modified_base 12: mod_base = um
  modified_base 13: mod_base = um
  modified_base 14: mod_base = um
  modified_base 15: mod_base = OTHER; note = guanosine
  modified_base 16: mod_base = OTHER; note = adenosine
  modified_base 17: mod_base = OTHER; note = adenosine
  modified_base 18: mod_base = OTHER; note = guanosine
  modified_base 19: mod_base = OTHER; note = adenosine
  modified_base 20: mod_base = OTHER; note = 2'-deoxythymidine
  modified_base 21: mod_base = OTHER; note = 2'-deoxythymidine
  source 1..21: mol_type = other RNA
atactaaatcatttgaagatt

SEQ ID NO: 1174 - RNA, 21 nt, synthetic construct
  modified_base 20..21: mod_base = OTHER; note = thymine
  modified_base 1: mod_base = um
  modified_base 2: mod_base = OTHER; note = adenosine
  modified_base 3: mod_base = cm
  modified_base 4: mod_base = um
  modified_base 5: mod_base = OTHER; note = adenosine
  modified_base 6: mod_base = OTHER; note = adenosine
  modified_base 7: mod_base = OTHER; note = adenosine
  modified_base 8: mod_base = um
  modified_base 9: mod_base = cm
  modified_base 10: mod_base = OTHER; note = adenosine
  modified_base 11: mod_base = um
  modified_base 12: mod_base = um
  modified_base 13: mod_base = um
  modified_base 14: mod_base = OTHER; note = guanosine
  modified_base 15: mod_base = OTHER; note = adenosine
  modified_base 16: mod_base = OTHER; note = adenosine
  modified_base 17: mod_base = OTHER; note = guanosine
  modified_base 18: mod_base = OTHER; note = adenosine
  modified_base 19: mod_base = um
  modified_base 20: mod_base = OTHER; note = 2'-deoxythymidine
  modified_base 21: mod_base = OTHER; note = 2'-deoxythymidine
  source 1..21: mol_type = other RNA
tactaaatcatttgaagattt

SEQ ID NO: 1175 - RNA, 21 nt, synthetic construct
  modified_base 20..21: mod_base = OTHER; note = thymine
  modified_base 1: mod_base = OTHER; note = adenosine
  modified_base 2: mod_base = cm
  modified_base 3: mod_base = um
  modified_base 4: mod_base = OTHER; note = adenosine
  modified_base 5: mod_base = OTHER; note = adenosine
  modified_base 6: mod_base = OTHER; note = adenosine
  modified_base 7: mod_base = um
  modified_base 8: mod_base = cm
  modified_base 9: mod_base = OTHER; note = adenosine
  modified_base 10: mod_base = um
  modified_base 11: mod_base = um
  modified_base 12: mod_base = um
  modified_base 13: mod_base = OTHER; note = guanosine
  modified_base 14: mod_base = OTHER; note = adenosine
  modified_base 15: mod_base = OTHER; note = adenosine
  modified_base 16: mod_base = OTHER; note = guanosine
  modified_base 17: mod_base = OTHER; note = adenosine
  modified_base 18: mod_base = um
  modified_base 19: mod_base = OTHER; note = adenosine
  modified_base 20: mod_base = OTHER; note = 2'-deoxythymidine
  modified_base 21: mod_base = OTHER; note = 2'-deoxythymidine
  source 1..21: mol_type = other RNA
actaaatcatttgaagatatt

SEQ ID NO: 1176 - RNA, 21 nt, synthetic construct
  modified_base 20..21: mod_base = OTHER; note = thymine
  modified_base 1: mod_base = cm
  modified_base 2: mod_base = um
  modified_base 3: mod_base = OTHER; note = adenosine
  modified_base 4: mod_base = OTHER; note = adenosine
  modified_base 5: mod_base = OTHER; note = adenosine
  modified_base 6: mod_base = um
  modified_base 7: mod_base = cm
  modified_base 8: mod_base = OTHER; note = adenosine
  modified_base 9: mod_base = um
  modified_base 10: mod_base = um
  modified_base 11: mod_base = um
  modified_base 12: mod_base = OTHER; note = guanosine
  modified_base 13: mod_base = OTHER; note = adenosine
  modified_base 14: mod_base = OTHER; note = adenosine
  modified_base 15: mod_base = OTHER; note = guanosine
  modified_base 16: mod_base = OTHER; note = adenosine
  modified_base 17: mod_base = um
  modified_base 18: mod_base = OTHER; note = adenosine
  modified_base 19: mod_base = um
  modified_base 20: mod_base = OTHER; note = 2'-deoxythymidine
  modified_base 21: mod_base = OTHER; note = 2'-deoxythymidine
  source 1..21: mol_type = other RNA
ctaaatcatttgaagatattt

SEQ ID NO: 1177 - RNA, 21 nt, synthetic construct
  modified_base 20..21: mod_base = OTHER; note = thymine
  modified_base 1: mod_base = um
  modified_base 2: mod_base = OTHER; note = adenosine
  modified_base 3: mod_base = OTHER; note = adenosine
  modified_base 4: mod_base = OTHER; note = adenosine
  modified_base 5: mod_base = um
  modified_base 6: mod_base = cm
  modified_base 7: mod_base = OTHER; note = adenosine
  modified_base 8: mod_base = um
  modified_base 9: mod_base = um
  modified_base 10: mod_base = um
  modified_base 11: mod_base = OTHER; note = guanosine
  modified_base 12: mod_base = OTHER; note = adenosine
  modified_base 13: mod_base = OTHER; note = adenosine
  modified_base 14: mod_base = OTHER; note = guanosine
  modified_base 15: mod_base = OTHER; note = adenosine
  modified_base 16: mod_base = um
  modified_base 17: mod_base = OTHER; note = adenosine
  modified_base 18: mod_base = um
  modified_base 19: mod_base = um
  modified_base 20: mod_base = OTHER; note = 2'-deoxythymidine
  modified_base 21: mod_base = OTHER; note = 2'-deoxythymidine
  source 1..21: mol_type = other RNA
taaatcatttgaagatatttt

SEQ ID NO: 1178 - RNA, 21 nt, synthetic construct
  modified_base 20..21: mod_base = OTHER; note = thymine
  modified_base 1: mod_base = OTHER; note = adenosine
  modified_base 2: mod_base = OTHER; note = adenosine
  modified_base 3: mod_base = OTHER; note = adenosine
  modified_base 4: mod_base = um
  modified_base 5: mod_base = cm
  modified_base 6: mod_base = OTHER; note = adenosine
  modified_base 7: mod_base = um
  modified_base 8: mod_base = um
  modified_base 9: mod_base = um
  modified_base 10: mod_base = OTHER; note = guanosine
  modified_base 11: mod_base = OTHER; note = adenosine
  modified_base 12: mod_base = OTHER; note = adenosine
  modified_base 13: mod_base = OTHER; note = guanosine
  modified_base 14: mod_base = OTHER; note = adenosine
  modified_base 15: mod_base = um
  modified_base 16: mod_base = OTHER; note = adenosine
  modified_base 17: mod_base = um
  modified_base 18: mod_base = um
  modified_base 19: mod_base = cm
  modified_base 20: mod_base = OTHER; note = 2'-deoxythymidine
  modified_base 21: mod_base = OTHER; note = 2'-deoxythymidine
  source 1..21: mol_type = other RNA
aaatcatttgaagatattctt

SEQ ID NO: 1179 - RNA, 21 nt, synthetic construct
  modified_base 20..21: mod_base = OTHER; note = thymine
  modified_base 1: mod_base = OTHER; note = adenosine
  modified_base 2: mod_base = OTHER; note = adenosine
  modified_base 3: mod_base = um
  modified_base 4: mod_base = cm
  modified_base 5: mod_base = OTHER; note = adenosine
  modified_base 6: mod_base = um
  modified_base 7: mod_base = um
  modified_base 8: mod_base = um
  modified_base 9: mod_base = OTHER; note = guanosine
  modified_base 10: mod_base = OTHER; note = adenosine
  modified_base 11: mod_base = OTHER; note = adenosine
  modified_base 12: mod_base = OTHER; note = guanosine
  modified_base 13: mod_base = OTHER; note = adenosine
  modified_base 14: mod_base = um
  modified_base 15: mod_base = OTHER; note = adenosine
  modified_base 16: mod_base = um
  modified_base 17: mod_base = um
  modified_base 18: mod_base = cm
  modified_base 19: mod_base = OTHER; note = adenosine
  modified_base 20: mod_base = OTHER; note = 2'-deoxythymidine
  modified_base 21: mod_base = OTHER; note = 2'-deoxythymidine
  source 1..21: mol_type = other RNA
aatcatttgaagatattcatt

SEQ ID NO: 1180 - RNA, 21 nt, synthetic construct
  modified_base 20..21: mod_base = OTHER; note = thymine
  modified_base 1: mod_base = um
  modified_base 2: mod_base = cm
  modified_base 3: mod_base = OTHER; note = adenosine
  modified_base 4: mod_base = um
  modified_base 5: mod_base = um
  modified_base 6: mod_base = um
  modified_base 7: mod_base = OTHER; note = guanosine
  modified_base 8: mod_base = OTHER; note = adenosine
  modified_base 9: mod_base = OTHER; note = adenosine
  modified_base 10: mod_base = OTHER; note = guanosine
  modified_base 11: mod_base = OTHER; note = adenosine
  modified_base 12: mod_base = um
  modified_base 13: mod_base = OTHER; note = adenosine
  modified_base 14: mod_base = um
  modified_base 15: mod_base = um
  modified_base 16: mod_base = cm
  modified_base 17: mod_base = OTHER; note = adenosine
  modified_base 18: mod_base = cm
  modified_base 19: mod_base = cm
  modified_base 20: mod_base = OTHER; note = 2'-deoxythymidine
  modified_base 21: mod_base = OTHER; note = 2'-deoxythymidine
  source 1..21: mol_type = other RNA
tcatttgaagatattcacctt

SEQ ID NO: 1181 - RNA, 21 nt, synthetic construct
  modified_base 20..21: mod_base = OTHER; note = thymine
  modified_base 1: mod_base = cm
  modified_base 2: mod_base = OTHER; note = adenosine
  modified_base 3: mod_base = um
  modified_base 4: mod_base = um
  modified_base 5: mod_base = um
  modified_base 6: mod_base = OTHER; note = guanosine
  modified_base 7: mod_base = OTHER; note = adenosine
  modified_base 8: mod_base = OTHER; note = adenosine
  modified_base 9: mod_base = OTHER; note = guanosine
  modified_base 10: mod_base = OTHER; note = adenosine
  modified_base 11: mod_base = um
  modified_base 12: mod_base = OTHER; note = adenosine
  modified_base 13: mod_base = um
  modified_base 14: mod_base = um
  modified_base 15: mod_base = cm
  modified_base 16: mod_base = OTHER; note = adenosine
  modified_base 17: mod_base = cm
  modified_base 18: mod_base = cm
  modified_base 19: mod_base = OTHER; note = adenosine
  modified_base 20: mod_base = OTHER; note = 2'-deoxythymidine
  modified_base 21: mod_base = OTHER; note = 2'-deoxythymidine
  source 1..21: mol_type = other RNA
catttgaagatattcaccatt

SEQ ID NO: 1182 - RNA, 21 nt, synthetic construct
  modified_base 20..21: mod_base = OTHER; note = thymine
  modified_base 1: mod_base = OTHER; note = adenosine
  modified_base 2: mod_base = um
  modified_base 3: mod_base = um
  modified_base 4: mod_base = um
  modified_base 5: mod_base = OTHER; note = guanosine
  modified_base 6: mod_base = OTHER; note = adenosine
  modified_base 7: mod_base = OTHER; note = adenosine
  modified_base 8: mod_base = OTHER; note = guanosine
  modified_base 9: mod_base = OTHER; note = adenosine
  modified_base 10: mod_base = um
  modified_base 11: mod_base = OTHER; note = adenosine
  modified_base 12: mod_base = um
  modified_base 13: mod_base = um
  modified_base 14: mod_base = cm
  modified_base 15: mod_base = OTHER; note = adenosine
  modified_base 16: mod_base = cm
  modified_base 17: mod_base = cm
  modified_base 18: mod_base = OTHER; note = adenosine
  modified_base 19: mod_base = um
  modified_base 20: mod_base = OTHER; note = 2'-deoxythymidine
  modified_base 21: mod_base = OTHER; note = 2'-deoxythymidine
  source 1..21: mol_type = other RNA
atttgaagatattcaccattt

SEQ ID NO: 1183 - RNA, 21 nt, synthetic construct
  modified_base 20..21: mod_base = OTHER; note = thymine
  modified_base 1: mod_base = um
  modified_base 2: mod_base = um
  modified_base 3: mod_base = um
  modified_base 4: mod_base = OTHER; note = guanosine
  modified_base 5: mod_base = OTHER; note = adenosine
  modified_base 6: mod_base = OTHER; note = adenosine
  modified_base 7: mod_base = OTHER; note = guanosine
  modified_base 8: mod_base = OTHER; note = adenosine
  modified_base 9: mod_base = um
  modified_base 10: mod_base = OTHER; note = adenosine
  modified_base 11: mod_base = um
  modified_base 12: mod_base = um
  modified_base 13: mod_base = cm
  modified_base 14: mod_base = OTHER; note = adenosine
  modified_base 15: mod_base = cm
  modified_base 16: mod_base = cm
  modified_base 17: mod_base = OTHER; note = adenosine
  modified_base 18: mod_base = um
  modified_base 19: mod_base = um
  modified_base 20: mod_base = OTHER; note = 2'-deoxythymidine
  modified_base 21: mod_base = OTHER; note = 2'-deoxythymidine
  source 1..21: mol_type = other RNA
tttgaagatattcaccatttt

SEQ ID NO: 1184 - RNA, 21 nt, synthetic construct
  modified_base 20..21: mod_base = OTHER; note = thymine
  modified_base 1: mod_base = um
  modified_base 2: mod_base = um
  modified_base 3: mod_base = OTHER; note = guanosine
  modified_base 4: mod_base = OTHER; note = adenosine
  modified_base 5: mod_base = OTHER; note = adenosine
  modified_base 6: mod_base = OTHER; note = guanosine
  modified_base 7: mod_base = OTHER; note = adenosine
  modified_base 8: mod_base = um
  modified_base 9: mod_base = OTHER; note = adenosine
  modified_base 10: mod_base = um
  modified_base 11: mod_base = um
  modified_base 12: mod_base = cm
  modified_base 13: mod_base = OTHER; note = adenosine
  modified_base 14: mod_base = cm
  modified_base 15: mod_base = cm
  modified_base 16: mod_base = OTHER; note = adenosine
  modified_base 17: mod_base = um
  modified_base 18: mod_base = um
  modified_base 19: mod_base = OTHER; note = adenosine
  modified_base 20: mod_base = OTHER; note = 2'-deoxythymidine
  modified_base 21: mod_base = OTHER; note = 2'-deoxythymidine
  source 1..21: mol_type = other RNA
ttgaagatattcaccattatt

SEQ ID NO: 1185 - RNA, 21 nt, synthetic construct
  modified_base 20..21: mod_base = OTHER; note = thymine
  modified_base 1: mod_base = OTHER; note = guanosine
  modified_base 2: mod_base = OTHER; note = adenosine
  modified_base 3: mod_base = OTHER; note = guanosine
  modified_base 4: mod_base = OTHER; note = adenosine
  modified_base 5: mod_base = OTHER; note = adenosine
  modified_base 6: mod_base = cm
  modified_base 7: mod_base = OTHER; note = adenosine
  modified_base 8: mod_base = OTHER; note = adenosine
  modified_base 9: mod_base = OTHER; note = adenosine
  modified_base 10: mod_base = um
  modified_base 11: mod_base = um
  modified_base 12: mod_base = OTHER; note = adenosine
  modified_base 13: mod_base = OTHER; note = adenosine
  modified_base 14: mod_base = OTHER; note = adenosine
  modified_base 15: mod_base = OTHER; note = adenosine
  modified_base 16: mod_base = OTHER; note = guanosine
  modified_base 17: mod_base = OTHER; note = adenosine
  modified_base 18: mod_base = OTHER; note = guanosine
  modified_base 19: mod_base = um
  modified_base 20: mod_base = OTHER; note = 2'-deoxythymidine
  modified_base 21: mod_base = OTHER; note = 2'-deoxythymidine
  source 1..21: mol_type = other RNA
gagaacaaattaaaagagttt

SEQ ID NO: 1186 - RNA, 21 nt, synthetic construct
  modified_base 20..21: mod_base = OTHER; note = thymine
  modified_base 1: mod_base = OTHER; note = adenosine
  modified_base 2: mod_base = OTHER; note = guanosine
  modified_base 3: mod_base = OTHER; note = adenosine
  modified_base 4: mod_base = OTHER; note = adenosine
  modified_base 5: mod_base = cm
  modified_base 6: mod_base = OTHER; note = adenosine
  modified_base 7: mod_base = OTHER; note = adenosine
  modified_base 8: mod_base = OTHER; note = adenosine
  modified_base 9: mod_base = um
  modified_base 10: mod_base = um
  modified_base 11: mod_base = OTHER; note = adenosine
  modified_base 12: mod_base = OTHER; note = adenosine
  modified_base 13: mod_base = OTHER; note = adenosine
  modified_base 14: mod_base = OTHER; note = adenosine
  modified_base 15: mod_base = OTHER; note = guanosine
  modified_base 16: mod_base = OTHER; note = adenosine
  modified_base 17: mod_base = OTHER; note = guanosine
  modified_base 18: mod_base = um
  modified_base 19: mod_base = um
  modified_base 20: mod_base = OTHER; note = 2'-deoxythymidine
  modified_base 21: mod_base = OTHER; note = 2'-deoxythymidine
  source 1..21: mol_type = other RNA
agaacaaattaaaagagtttt

SEQ ID NO: 1187 - RNA, 21 nt, synthetic construct
  modified_base 20..21: mod_base = OTHER; note = thymine
  modified_base 1: mod_base = OTHER; note = guanosine
  modified_base 2: mod_base = OTHER; note = adenosine
  modified_base 3: mod_base = OTHER; note = adenosine
  modified_base 4: mod_base = cm
  modified_base 5: mod_base = OTHER; note = adenosine
  modified_base 6: mod_base = OTHER; note = adenosine
  modified_base 7: mod_base = OTHER; note = adenosine
  modified_base 8: mod_base = um
  modified_base 9: mod_base = um
  modified_base 10: mod_base = OTHER; note = adenosine
  modified_base 11: mod_base = OTHER; note = adenosine
  modified_base 12: mod_base = OTHER; note = adenosine
  modified_base 13: mod_base = OTHER; note = adenosine
  modified_base 14: mod_base = OTHER; note = guanosine
  modified_base 15: mod_base = OTHER; note = adenosine
  modified_base 16: mod_base = OTHER; note = guanosine
  modified_base 17: mod_base = um
  modified_base 18: mod_base = um
  modified_base 19: mod_base = OTHER; note = adenosine
  modified_base 20: mod_base = OTHER; note = 2'-deoxythymidine
  modified_base 21: mod_base = OTHER; note = 2'-deoxythymidine
  source 1..21: mol_type = other RNA
gaacaaattaaaagagttatt

SEQ ID NO: 1188 - RNA, 21 nt, synthetic construct
  modified_base 20..21: mod_base = OTHER; note = thymine
  modified_base 1: mod_base = OTHER; note = adenosine
  modified_base 2: mod_base = OTHER; note = adenosine
  modified_base 3: mod_base = cm
  modified_base 4: mod_base = OTHER; note = adenosine
  modified_base 5: mod_base = OTHER; note = adenosine
  modified_base 6: mod_base = OTHER; note = adenosine
  modified_base 7: mod_base = um
  modified_base 8: mod_base = um
  modified_base 9: mod_base = OTHER; note = adenosine
  modified_base 10: mod_base = OTHER; note = adenosine
  modified_base 11: mod_base = OTHER; note = adenosine
  modified_base 12: mod_base = OTHER; note = adenosine
  modified_base 13: mod_base = OTHER; note = guanosine
  modified_base 14: mod_base = OTHER; note = adenosine
  modified_base 15: mod_base = OTHER; note = guanosine
  modified_base 16: mod_base = um
  modified_base 17: mod_base = um
  modified_base 18: mod_base = OTHER; note = adenosine
  modified_base 19: mod_base = OTHER; note = adenosine
  modified_base 20: mod_base = OTHER; note = 2'-deoxythymidine
  modified_base 21: mod_base = OTHER; note = 2'-deoxythymidine
  source 1..21: mol_type = other RNA
aacaaattaaaagagttaatt

SEQ ID NO: 1189 - RNA, 21 nt, synthetic construct
  modified_base 20..21: mod_base = OTHER; note = thymine
  modified_base 1: mod_base = OTHER; note = adenosine
  modified_base 2: mod_base = cm
  modified_base 3: mod_base = OTHER; note = adenosine
  modified_base 4: mod_base = OTHER; note = adenosine
  modified_base 5: mod_base = OTHER; note = adenosine
  modified_base 6: mod_base = um
  modified_base 7: mod_base = um
  modified_base 8: mod_base = OTHER; note = adenosine
  modified_base 9: mod_base = OTHER; note = adenosine
  modified_base 10: mod_base = OTHER; note = adenosine
  modified_base 11: mod_base = OTHER; note = adenosine
  modified_base 12: mod_base = OTHER; note = guanosine
  modified_base 13: mod_base = OTHER; note = adenosine
  modified_base 14: mod_base = OTHER; note = guanosine
  modified_base 15: mod_base = um
  modified_base 16: mod_base = um
  modified_base 17: mod_base = OTHER; note = adenosine
  modified_base 18: mod_base = OTHER; note = adenosine
  modified_base 19: mod_base = OTHER; note = guanosine
  modified_base 20: mod_base = OTHER; note = 2'-deoxythymidine
  modified_base 21: mod_base = OTHER; note = 2'-deoxythymidine
  source 1..21: mol_type = other RNA
acaaattaaaagagttaagtt

SEQ ID NO: 1190 - RNA, 21 nt, synthetic construct
  modified_base 20..21: mod_base = OTHER; note = thymine
  modified_base 1: mod_base = cm
  modified_base 2: mod_base = OTHER; note = adenosine
  modified_base 3: mod_base = OTHER; note = adenosine
  modified_base 4: mod_base = OTHER; note = adenosine
  modified_base 5: mod_base = um
  modified_base 6: mod_base = um
  modified_base 7: mod_base = OTHER; note = adenosine
  modified_base 8: mod_base = OTHER; note = adenosine
  modified_base 9: mod_base = OTHER; note = adenosine
  modified_base 10: mod_base = OTHER; note = adenosine
  modified_base 11: mod_base = OTHER; note = guanosine
  modified_base 12: mod_base = OTHER; note = adenosine
  modified_base 13: mod_base = OTHER; note = guanosine
  modified_base 14: mod_base = um
  modified_base 15: mod_base = um
  modified_base 16: mod_base = OTHER; note = adenosine
  modified_base 17: mod_base = OTHER; note = adenosine
  modified_base 18: mod_base = OTHER; note = guanosine
  modified_base 19: mod_base = OTHER; note = guanosine
  modified_base 20: mod_base = OTHER; note = 2'-deoxythymidine
  modified_base 21: mod_base = OTHER; note = 2'-deoxythymidine
  source 1..21: mol_type = other RNA
caaattaaaagagttaaggtt

SEQ ID NO: 1191 - RNA, 21 nt, synthetic construct
  modified_base 20..21: mod_base = OTHER; note = thymine
  modified_base 1: mod_base = OTHER; note = adenosine
  modified_base 2: mod_base = OTHER; note = adenosine
  modified_base 3: mod_base = OTHER; note = adenosine
  modified_base 4: mod_base = um
  modified_base 5: mod_base = um
  modified_base 6: mod_base = OTHER; note = adenosine
  modified_base 7: mod_base = OTHER; note = adenosine
  modified_base 8: mod_base = OTHER; note = adenosine
  modified_base 9: mod_base = OTHER; note = adenosine
  modified_base 10: mod_base = OTHER; note = guanosine
  modified_base 11: mod_base = OTHER; note = adenosine
  modified_base 12: mod_base = OTHER; note = guanosine
  modified_base 13: mod_base = um
  modified_base 14: mod_base = um
  modified_base 15: mod_base = OTHER; note = adenosine
  modified_base 16: mod_base = OTHER; note = adenosine
  modified_base 17: mod_base = OTHER; note = guanosine
  modified_base 18: mod_base = OTHER; note = guanosine
  modified_base 19: mod_base = OTHER; note = adenosine
  modified_base 20: mod_base = OTHER; note = 2'-deoxythymidine
  modified_base 21: mod_base = OTHER; note = 2'-deoxythymidine
  source 1..21: mol_type = other RNA
aaattaaaagagttaaggatt

SEQ ID NO: 1192 - RNA, 21 nt, synthetic construct
  modified_base 20..21: mod_base = OTHER; note = thymine
  modified_base 1: mod_base = OTHER; note = adenosine
  modified_base 2: mod_base = OTHER; note = adenosine
  modified_base 3: mod_base = um
  modified_base 4: mod_base = um
  modified_base 5: mod_base = OTHER; note = adenosine
  modified_base 6: mod_base = OTHER; note = adenosine
  modified_base 7: mod_base = OTHER; note = adenosine
  modified_base 8: mod_base = OTHER; note = adenosine
  modified_base 9: mod_base = OTHER; note = guanosine
  modified_base 10: mod_base = OTHER; note = adenosine
  modified_base 11: mod_base = OTHER; note = guanosine
  modified_base 12: mod_base = um
  modified_base 13: mod_base = um
  modified_base 14: mod_base = OTHER; note = adenosine
  modified_base 15: mod_base = OTHER; note = adenosine
  modified_base 16: mod_base = OTHER; note = guanosine
  modified_base 17: mod_base = OTHER; note = guanosine
  modified_base 18: mod_base = OTHER; note = adenosine
  modified_base 19: mod_base = cm
  modified_base 20: mod_base = OTHER; note = 2'-deoxythymidine
  modified_base 21: mod_base = OTHER; note = 2'-deoxythymidine
  source 1..21: mol_type = other RNA
aattaaaagagttaaggactt

SEQ ID NO: 1193 - RNA, 21 nt, synthetic construct
  modified_base 20..21: mod_base = OTHER; note = thymine
  modified_base 1: mod_base = OTHER; note = adenosine
  modified_base 2: mod_base = um
  modified_base 3: mod_base = um
  modified_base 4: mod_base = OTHER; note = adenosine
  modified_base 5: mod_base = OTHER; note = adenosine
  modified_base 6: mod_base = OTHER; note = adenosine
  modified_base 7: mod_base = OTHER; note = adenosine
  modified_base 8: mod_base = OTHER; note = guanosine
  modified_base 9: mod_base = OTHER; note = adenosine
  modified_base 10: mod_base = OTHER; note = guanosine
  modified_base 11: mod_base = um
  modified_base 12: mod_base = um
  modified_base 13: mod_base = OTHER; note = adenosine
  modified_base 14: mod_base = OTHER; note = adenosine
  modified_base 15: mod_base = OTHER; note = guanosine
  modified_base 16: mod_base = OTHER; note = guanosine
  modified_base 17: mod_base = OTHER; note = adenosine
  modified_base 18: mod_base = cm
  modified_base 19: mod_base = um
  modified_base 20: mod_base = OTHER; note = 2'-deoxythymidine
  modified_base 21: mod_base = OTHER; note = 2'-deoxythymidine
  source 1..21: mol_type = other RNA
attaaaagagttaaggacttt

SEQ ID NO: 1194 - RNA, 21 nt, synthetic construct
  modified_base 20..21: mod_base = OTHER; note = thymine
  modified_base 1: mod_base = um
  modified_base 2: mod_base = um
  modified_base 3: mod_base = OTHER; note = adenosine
  modified_base 4: mod_base = OTHER; note = adenosine
  modified_base 5: mod_base = OTHER; note = adenosine
  modified_base 6: mod_base = OTHER; note = adenosine
  modified_base 7: mod_base = OTHER; note = guanosine
  modified_base 8: mod_base = OTHER; note = adenosine
  modified_base 9: mod_base = OTHER; note = guanosine
  modified_base 10: mod_base = um
  modified_base 11: mod_base = um
  modified_base 12: mod_base = OTHER; note = adenosine
  modified_base 13: mod_base = OTHER; note = adenosine
  modified_base 14: mod_base = OTHER; note = guanosine
  modified_base 15: mod_base = OTHER; note = guanosine
  modified_base 16: mod_base = OTHER; note = adenosine
  modified_base 17: mod_base = cm
  modified_base 18: mod_base = um
  modified_base 19: mod_base = cm
  modified_base 20: mod_base = OTHER; note = 2'-deoxythymidine
  modified_base 21: mod_base = OTHER; note = 2'-deoxythymidine
  source 1..21: mol_type = other RNA
ttaaaagagttaaggactctt

SEQ ID NO: 1195 - RNA, 21 nt, synthetic construct
  modified_base 20..21: mod_base = OTHER; note = thymine
  modified_base 1: mod_base = um
  modified_base 2: mod_base = OTHER; note = adenosine
  modified_base 3: mod_base = OTHER; note = adenosine
  modified_base 4: mod_base = OTHER; note = adenosine
  modified_base 5: mod_base = OTHER; note = adenosine
  modified_base 6: mod_base = OTHER; note = guanosine
  modified_base 7: mod_base = OTHER; note = adenosine
  modified_base 8: mod_base = OTHER; note = guanosine
  modified_base 9: mod_base = um
  modified_base 10: mod_base = um
  modified_base 11: mod_base = OTHER; note = adenosine
  modified_base 12: mod_base = OTHER; note = adenosine
  modified_base 13: mod_base = OTHER; note = guanosine
  modified_base 14: mod_base = OTHER; note = guanosine
  modified_base 15: mod_base = OTHER; note = adenosine
  modified_base 16: mod_base = cm
  modified_base 17: mod_base = um
  modified_base 18: mod_base = cm
  modified_base 19: mod_base = um
  modified_base 20: mod_base = OTHER; note = 2'-deoxythymidine
  modified_base 21: mod_base = OTHER; note = 2'-deoxythymidine
  source 1..21: mol_type = other RNA
taaaagagttaaggactcttt

SEQ ID NO: 1196 - RNA, 21 nt, synthetic construct
  modified_base 20..21: mod_base = OTHER; note = thymine
  modified_base 1: mod_base = OTHER; note = adenosine
  modified_base 2: mod_base = OTHER; note = adenosine
  modified_base 3: mod_base = OTHER; note = adenosine
  modified_base 4: mod_base = OTHER; note = adenosine
  modified_base 5: mod_base = OTHER; note = guanosine
  modified_base 6: mod_base = OTHER; note = adenosine
  modified_base 7: mod_base = OTHER; note = guanosine
  modified_base 8: mod_base = um
  modified_base 9: mod_base = um
  modified_base 10: mod_base = OTHER; note = adenosine
  modified_base 11: mod_base = OTHER; note = adenosine
  modified_base 12: mod_base = OTHER; note = guanosine
  modified_base 13: mod_base = OTHER; note = guanosine
  modified_base 14: mod_base = OTHER; note = adenosine
  modified_base 15: mod_base = cm
  modified_base 16: mod_base = um
  modified_base 17: mod_base = cm
  modified_base 18: mod_base = um
  modified_base 19: mod_base = OTHER; note = guanosine
  modified_base 20: mod_base = OTHER; note = 2'-deoxythymidine
  modified_base 21: mod_base = OTHER; note = 2'-deoxythymidine
  source 1..21: mol_type = other RNA
aaaagagttaaggactctgtt

SEQ ID NO: 1197 - RNA, 21 nt, synthetic construct
  modified_base 20..21: mod_base = OTHER; note = thymine
  modified_base 1: mod_base = OTHER; note = adenosine
  modified_base 2: mod_base = OTHER; note = adenosine
  modified_base 3: mod_base = OTHER; note = adenosine
  modified_base 4: mod_base = OTHER; note = guanosine
  modified_base 5: mod_base = OTHER; note = adenosine
  modified_base 6: mod_base = OTHER; note = guanosine
  modified_base 7: mod_base = um
  modified_base 8: mod_base = um
  modified_base 9: mod_base = OTHER; note = adenosine
  modified_base 10: mod_base = OTHER; note = adenosine
  modified_base 11: mod_base = OTHER; note = guanosine
  modified_base 12: mod_base = OTHER; note = guanosine
  modified_base 13: mod_base = OTHER; note = adenosine
  modified_base 14: mod_base = cm
  modified_base 15: mod_base = um
  modified_base 16: mod_base = cm
  modified_base 17: mod_base = um
  modified_base 18: mod_base = OTHER; note = guanosine
  modified_base 19: mod_base = OTHER; note = adenosine
  modified_base 20: mod_base = OTHER; note = 2'-deoxythymidine
  modified_base 21: mod_base = OTHER; note = 2'-deoxythymidine
  source 1..21: mol_type = other RNA
aaagagttaaggactctgatt

SEQ ID NO: 1198 - RNA, 21 nt, synthetic construct
  modified_base 20..21: mod_base = OTHER; note = thymine
  modified_base 1: mod_base = OTHER; note = adenosine
  modified_base 2: mod_base = OTHER; note = adenosine
  modified_base 3: mod_base = OTHER; note = guanosine
  modified_base 4: mod_base = OTHER; note = adenosine
  modified_base 5: mod_base = OTHER; note = guanosine
  modified_base 6: mod_base = um
  modified_base 7: mod_base = um
  modified_base 8: mod_base = OTHER; note = adenosine
  modified_base 9: mod_base = OTHER; note = adenosine
  modified_base 10: mod_base = OTHER; note = guanosine
  modified_base 11: mod_base = OTHER; note = guanosine
  modified_base 12: mod_base = OTHER; note = adenosine
  modified_base 13: mod_base = cm
  modified_base 14: mod_base = um
  modified_base 15: mod_base = cm
  modified_base 16: mod_base = um
  modified_base 17: mod_base = OTHER; note = guanosine
  modified_base 18: mod_base = OTHER; note = adenosine
  modified_base 19: mod_base = OTHER; note = adenosine
  modified_base 20: mod_base = OTHER; note = 2'-deoxythymidine
  modified_base 21: mod_base = OTHER; note = 2'-deoxythymidine
  source 1..21: mol_type = other RNA
aagagttaaggactctgaatt

SEQ ID NO: 1199 - RNA, 21 nt, synthetic construct
  modified_base 20..21: mod_base = OTHER; note = thymine
  modified_base 1: mod_base = OTHER; note = guanosine
  modified_base 2: mod_base = OTHER; note = adenosine
  modified_base 3: mod_base = OTHER; note = guanosine
  modified_base 4: mod_base = um
  modified_base 5: mod_base = um
  modified_base 6: mod_base = OTHER; note = adenosine
  modified_base 7: mod_base = OTHER; note = adenosine
  modified_base 8: mod_base = OTHER; note = guanosine
  modified_base 9: mod_base = OTHER; note = guanosine
  modified_base 10: mod_base = OTHER; note = adenosine
  modified_base 11: mod_base = cm
  modified_base 12: mod_base = um
  modified_base 13: mod_base = cm
  modified_base 14: mod_base = um
  modified_base 15: mod_base = OTHER; note = guanosine
  modified_base 16: mod_base = OTHER; note = adenosine
  modified_base 17: mod_base = OTHER; note = adenosine
  modified_base 18: mod_base = OTHER; note = guanosine
  modified_base 19: mod_base = OTHER; note = adenosine
  modified_base 20: mod_base = OTHER; note = 2'-deoxythymidine
  modified_base 21: mod_base = OTHER; note = 2'-deoxythymidine
  source 1..21: mol_type = other RNA
gagttaaggactctgaagatt

SEQ ID NO: 1200 - RNA, 21 nt, synthetic construct
  modified_base 20..21: mod_base = OTHER; note = thymine
  modified_base 1: mod_base = OTHER; note = adenosine
  modified_base 2: mod_base = OTHER; note = guanosine
  modified_base 3: mod_base = um
  modified_base 4: mod_base = um
  modified_base 5: mod_base = OTHER; note = adenosine
  modified_base 6: mod_base = OTHER; note = adenosine
  modified_base 7: mod_base = OTHER; note = guanosine
  modified_base 8: mod_base = OTHER; note = guanosine
  modified_base 9: mod_base = OTHER; note = adenosine
  modified_base 10: mod_base = cm
  modified_base 11: mod_base = um
  modified_base 12: mod_base = cm
  modified_base 13: mod_base = um
  modified_base 14: mod_base = OTHER; note = guanosine
  modified_base 15: mod_base = OTHER; note = adenosine
  modified_base 16: mod_base = OTHER; note = adenosine
  modified_base 17: mod_base = OTHER; note = guanosine
  modified_base 18: mod_base = OTHER; note = adenosine
  modified_base 19: mod_base = um
  modified_base 20: mod_base = OTHER; note = 2'-deoxythymidine
  modified_base 21: mod_base = OTHER; note = 2'-deoxythymidine
  source 1..21: mol_type = other RNA
agttaaggactctgaagattt

SEQ ID NO: 1201 - RNA, 21 nt, synthetic construct
  modified_base 20..21: mod_base = OTHER; note = thymine
  modified_base 1: mod_base = OTHER; note = guanosine
  modified_base 2: mod_base = um
  modified_base 3: mod_base = um
  modified_base 4: mod_base = OTHER; note = adenosine
  modified_base 5: mod_base = OTHER; note = adenosine
  modified_base 6: mod_base = OTHER; note = guanosine
  modified_base 7: mod_base = OTHER; note = guanosine
  modified_base 8: mod_base = OTHER; note = adenosine
  modified_base 9: mod_base = cm
  modified_base 10: mod_base = um
  modified_base 11: mod_base = cm
  modified_base 12: mod_base = um
  modified_base 13: mod_base = OTHER; note = guanosine
  modified_base 14: mod_base = OTHER; note = adenosine
  modified_base 15: mod_base = OTHER; note = adenosine
  modified_base 16: mod_base = OTHER; note = guanosine
  modified_base 17: mod_base = OTHER; note = adenosine
  modified_base 18: mod_base = um
  modified_base 19: mod_base = OTHER; note = guanosine
  modified_base 20: mod_base = OTHER; note = 2'-deoxythymidine
  modified_base 21: mod_base = OTHER; note = 2'-deoxythymidine
  source 1..21: mol_type = other RNA
gttaaggactctgaagatgtt

SEQ ID NO: 1202 - RNA, 21 nt, synthetic construct
  modified_base 20..21: mod_base = OTHER; note = thymine
  modified_base 1: mod_base = um
  modified_base 2: mod_base = um
  modified_base 3: mod_base = OTHER; note = adenosine
  modified_base 4: mod_base = OTHER; note = adenosine
  modified_base 5: mod_base = OTHER; note = guanosine
  modified_base 6: mod_base = OTHER; note = guanosine
  modified_base 7: mod_base = OTHER; note = adenosine
  modified_base 8: mod_base = cm
  modified_base 9: mod_base = um
  modified_base 10: mod_base = cm
  modified_base 11: mod_base = um
  modified_base 12: mod_base = OTHER; note = guanosine
  modified_base 13: mod_base = OTHER; note = adenosine
  modified_base 14: mod_base = OTHER; note = adenosine
  modified_base 15: mod_base = OTHER; note = guanosine
  modified_base 16: mod_base = OTHER; note = adenosine
  modified_base 17: mod_base = um
  modified_base 18: mod_base = OTHER; note = guanosine
  modified_base 19: mod_base = um
  modified_base 20: mod_base = OTHER; note = 2'-deoxythymidine
  modified_base 21: mod_base = OTHER; note = 2'-deoxythymidine
  source 1..21: mol_type = other RNA
ttaaggactctgaagatgttt

SEQ ID NO: 1203 - RNA, 21 nt, synthetic construct
  modified_base 20..21: mod_base = OTHER; note = thymine
  modified_base 1: mod_base = OTHER; note = adenosine
  modified_base 2: mod_base = OTHER; note = adenosine
  modified_base 3: mod_base = OTHER; note = guanosine
  modified_base 4: mod_base = OTHER; note = guanosine
  modified_base 5: mod_base = OTHER; note = adenosine
  modified_base 6: mod_base = cm
  modified_base 7: mod_base = um
  modified_base 8: mod_base = cm
  modified_base 9: mod_base = um
  modified_base 10: mod_base = OTHER; note = guanosine
  modified_base 11: mod_base = OTHER; note = adenosine
  modified_base 12: mod_base = OTHER; note = adenosine
  modified_base 13: mod_base = OTHER; note = guanosine
  modified_base 14: mod_base = OTHER; note = adenosine
  modified_base 15: mod_base = um
  modified_base 16: mod_base = OTHER; note = guanosine
  modified_base 17: mod_base = um
  modified_base 18: mod_base = OTHER; note = adenosine
  modified_base 19: mod_base = cm
  modified_base 20: mod_base = OTHER; note = 2'-deoxythymidine
  modified_base 21: mod_base = OTHER; note = 2'-deoxythymidine
  source 1..21: mol_type = other RNA
aaggactctgaagatgtactt

SEQ ID NO: 1204 - RNA, 21 nt, synthetic construct
  modified_base 20..21: mod_base = OTHER; note = thymine
  modified_base 1: mod_base = OTHER; note = adenosine
  modified_base 2: mod_base = OTHER; note = guanosine
  modified_base 3: mod_base = OTHER; note = guanosine
  modified_base 4: mod_base = OTHER; note = adenosine
  modified_base 5: mod_base = cm
  modified_base 6: mod_base = um
  modified_base 7: mod_base = cm
  modified_base 8: mod_base = um
  modified_base 9: mod_base = OTHER; note = guanosine
  modified_base 10: mod_base = OTHER; note = adenosine
  modified_base 11: mod_base = OTHER; note = adenosine
  modified_base 12: mod_base = OTHER; note = guanosine
  modified_base 13: mod_base = OTHER; note = adenosine
  modified_base 14: mod_base = um
  modified_base 15: mod_base = OTHER; note = guanosine
  modified_base 16: mod_base = um
  modified_base 17: mod_base = OTHER; note = adenosine
  modified_base 18: mod_base = cm
  modified_base 19: mod_base = cm
  modified_base 20: mod_base = OTHER; note = 2'-deoxythymidine
  modified_base 21: mod_base = OTHER; note = 2'-deoxythymidine
  source 1..21: mol_type = other RNA
aggactctgaagatgtacctt

SEQ ID NO: 1205 - RNA, 21 nt, synthetic construct
  modified_base 20..21: mod_base = OTHER; note = thymine
  modified_base 1: mod_base = OTHER; note = guanosine
  modified_base 2: mod_base = OTHER; note = guanosine
  modified_base 3: mod_base = OTHER; note = adenosine
  modified_base 4: mod_base = cm
  modified_base 5: mod_base = um
  modified_base 6: mod_base = cm
  modified_base 7: mod_base = um
  modified_base 8: mod_base = OTHER; note = guanosine
  modified_base 9: mod_base = OTHER; note = adenosine
  modified_base 10: mod_base = OTHER; note = adenosine
  modified_base 11: mod_base = OTHER; note = guanosine
  modified_base 12: mod_base = OTHER; note = adenosine
  modified_base 13: mod_base = um
  modified_base 14: mod_base = OTHER; note = guanosine
  modified_base 15: mod_base = um
  modified_base 16: mod_base = OTHER; note = adenosine
  modified_base 17: mod_base = cm
  modified_base 18: mod_base = cm
  modified_base 19: mod_base = um
  modified_base 20: mod_base = OTHER; note = 2'-deoxythymidine
  modified_base 21: mod_base = OTHER; note = 2'-deoxythymidine
  source 1..21: mol_type = other RNA
ggactctgaagatgtaccttt

SEQ ID NO: 1206 - RNA, 21 nt, synthetic construct
  modified_base 20..21: mod_base = OTHER; note = thymine
  modified_base 1: mod_base = OTHER; note = guanosine
  modified_base 2: mod_base = OTHER; note = adenosine
  modified_base 3: mod_base = cm
  modified_base 4: mod_base = um
  modified_base 5: mod_base = cm
  modified_base 6: mod_base = um
  modified_base 7: mod_base = OTHER; note = guanosine
  modified_base 8: mod_base = OTHER; note = adenosine
  modified_base 9: mod_base = OTHER; note = adenosine
  modified_base 10: mod_base = OTHER; note = guanosine
  modified_base 11: mod_base = OTHER; note = adenosine
  modified_base 12: mod_base = um
  modified_base 13: mod_base = OTHER; note = guanosine
  modified_base 14: mod_base = um
  modified_base 15: mod_base = OTHER; note = adenosine
  modified_base 16: mod_base = cm
  modified_base 17: mod_base = cm
  modified_base 18: mod_base = um
  modified_base 19: mod_base = OTHER; note = adenosine
  modified_base 20: mod_base = OTHER; note = 2'-deoxythymidine
  modified_base 21: mod_base = OTHER; note = 2'-deoxythymidine
  source 1..21: mol_type = other RNA
gactctgaagatgtacctatt

SEQ ID NO: 1207 - RNA, 21 nt, synthetic construct
  modified_base 20..21: mod_base = OTHER; note = thymine
  modified_base 1: mod_base = OTHER; note = adenosine
  modified_base 2: mod_base = cm
  modified_base 3: mod_base = um
  modified_base 4: mod_base = cm
  modified_base 5: mod_base = um
  modified_base 6: mod_base = OTHER; note = guanosine
  modified_base 7: mod_base = OTHER; note = adenosine
  modified_base 8: mod_base = OTHER; note = adenosine
  modified_base 9: mod_base = OTHER; note = guanosine
  modified_base 10: mod_base = OTHER; note = adenosine
  modified_base 11: mod_base = um
  modified_base 12: mod_base = OTHER; note = guanosine
  modified_base 13: mod_base = um
  modified_base 14: mod_base = OTHER; note = adenosine
  modified_base 15: mod_base = cm
  modified_base 16: mod_base = cm
  modified_base 17: mod_base = um
  modified_base 18: mod_base = OTHER; note = adenosine
  modified_base 19: mod_base = um
  modified_base 20: mod_base = OTHER; note = 2'-deoxythymidine
  modified_base 21: mod_base = OTHER; note = 2'-deoxythymidine
  source 1..21: mol_type = other RNA
actctgaagatgtacctattt

SEQ ID NO: 1208 - RNA, 21 nt, synthetic construct
  modified_base 20..21: mod_base = OTHER; note = thymine
  modified_base 1: mod_base = cm
  modified_base 2: mod_base = um
  modified_base 3: mod_base = cm
  modified_base 4: mod_base = um
  modified_base 5: mod_base = OTHER; note = guanosine
  modified_base 6: mod_base = OTHER; note = adenosine
  modified_base 7: mod_base = OTHER; note = adenosine
  modified_base 8: mod_base = OTHER; note = guanosine
  modified_base 9: mod_base = OTHER; note = adenosine
  modified_base 10: mod_base = um
  modified_base 11: mod_base = OTHER; note = guanosine
  modified_base 12: mod_base = um
  modified_base 13: mod_base = OTHER; note = adenosine
  modified_base 14: mod_base = cm
  modified_base 15: mod_base = cm
  modified_base 16: mod_base = um
  modified_base 17: mod_base = OTHER; note = adenosine
  modified_base 18: mod_base = um
  modified_base 19: mod_base = OTHER; note = guanosine
  modified_base 20: mod_base = OTHER; note = 2'-deoxythymidine
  modified_base 21: mod_base = OTHER; note = 2'-deoxythymidine
  source 1..21: mol_type = other RNA
ctctgaagatgtacctatgtt

SEQ ID NO: 1209 - RNA, 21 nt, synthetic construct
  modified_base 20..21: mod_base = OTHER; note = thymine
  modified_base 1: mod_base = um
  modified_base 2: mod_base = cm
  modified_base 3: mod_base = um
  modified_base 4: mod_base = OTHER; note = guanosine
  modified_base 5: mod_base = OTHER; note = adenosine
  modified_base 6: mod_base = OTHER; note = adenosine
  modified_base 7: mod_base = OTHER; note = guanosine
  modified_base 8: mod_base = OTHER; note = adenosine
  modified_base 9: mod_base = um
  modified_base 10: mod_base = OTHER; note = guanosine
  modified_base 11: mod_base = um
  modified_base 12: mod_base = OTHER; note = adenosine
  modified_base 13: mod_base = cm
  modified_base 14: mod_base = cm
  modified_base 15: mod_base = um
  modified_base 16: mod_base = OTHER; note = adenosine
  modified_base 17: mod_base = um
  modified_base 18: mod_base = OTHER; note = guanosine
  modified_base 19: mod_base = OTHER; note = guanosine
  modified_base 20: mod_base = OTHER; note = 2'-deoxythymidine
  modified_base 21: mod_base = OTHER; note = 2'-deoxythymidine
  source 1..21: mol_type = other RNA
tctgaagatgtacctatggtt

SEQ ID NO: 1210 - RNA, 21 nt, synthetic construct
  modified_base 20..21: mod_base = OTHER; note = thymine
  modified_base 1: mod_base = cm
  modified_base 2: mod_base = um
  modified_base 3: mod_base = OTHER; note = guanosine
  modified_base 4: mod_base = OTHER; note = adenosine
  modified_base 5: mod_base = OTHER; note = adenosine
  modified_base 6: mod_base = OTHER; note = guanosine
  modified_base 7: mod_base = OTHER; note = adenosine
  modified_base 8: mod_base = um
  modified_base 9: mod_base = OTHER; note = guanosine
  modified_base 10: mod_base = um
  modified_base 11: mod_base = OTHER; note = adenosine
  modified_base 12: mod_base = cm
  modified_base 13: mod_base = cm
  modified_base 14: mod_base = um
  modified_base 15: mod_base = OTHER; note = adenosine
  modified_base 16: mod_base = um
  modified_base 17: mod_base = OTHER; note = guanosine
  modified_base 18: mod_base = OTHER; note = guanosine
  modified_base 19: mod_base = um
  modified_base 20: mod_base = OTHER; note = 2'-deoxythymidine
  modified_base 21: mod_base = OTHER; note = 2'-deoxythymidine
  source 1..21: mol_type = other RNA
ctgaagatgtacctatggttt

SEQ ID NO: 1211 - RNA, 21 nt, synthetic construct
  modified_base 20..21: mod_base = OTHER; note = thymine
  modified_base 1: mod_base = um
  modified_base 2: mod_base = OTHER; note = guanosine
  modified_base 3: mod_base = OTHER; note = adenosine
  modified_base 4: mod_base = OTHER; note = adenosine
  modified_base 5: mod_base = OTHER; note = guanosine
  modified_base 6: mod_base = OTHER; note = adenosine
  modified_base 7: mod_base = um
  modified_base 8: mod_base = OTHER; note = guanosine
  modified_base 9: mod_base = um
  modified_base 10: mod_base = OTHER; note = adenosine
  modified_base 11: mod_base = cm
  modified_base 12: mod_base = cm
  modified_base 13: mod_base = um
  modified_base 14: mod_base = OTHER; note = adenosine
  modified_base 15: mod_base = um
  modified_base 16: mod_base = OTHER; note = guanosine
  modified_base 17: mod_base = OTHER; note = guanosine
  modified_base 18: mod_base = um
  modified_base 19: mod_base = cm
  modified_base 20: mod_base = OTHER; note = 2'-deoxythymidine
  modified_base 21: mod_base = OTHER; note = 2'-deoxythymidine
  source 1..21: mol_type = other RNA
tgaagatgtacctatggtctt

SEQ ID NO: 1212 - RNA, 21 nt, synthetic construct
  modified_base 20..21: mod_base = OTHER; note = thymine
  modified_base 1: mod_base = OTHER; note = guanosine
  modified_base 2: mod_base = um
  modified_base 3: mod_base = OTHER; note = adenosine
  modified_base 4: mod_base = OTHER; note = guanosine
  modified_base 5: mod_base = OTHER; note = guanosine
  modified_base 6: mod_base = OTHER; note = adenosine
  modified_base 7: mod_base = OTHER; note = adenosine
  modified_base 8: mod_base = OTHER; note = adenosine
  modified_base 9: mod_base = um
  modified_base 10: mod_base = OTHER; note = adenosine
  modified_base 11: mod_base = OTHER; note = adenosine
  modified_base 12: mod_base = OTHER; note = adenosine
  modified_base 13: mod_base = um
  modified_base 14: mod_base = OTHER; note = guanosine
  modified_base 15: mod_base = um
  modified_base 16: mod_base = OTHER; note = guanosine
  modified_base 17: mod_base = OTHER; note = adenosine
  modified_base 18: mod_base = um
  modified_base 19: mod_base = um
  modified_base 20: mod_base = OTHER; note = 2'-deoxythymidine
  modified_base 21: mod_base = OTHER; note = 2'-deoxythymidine
  source 1..21: mol_type = other RNA
gtaggaaataaatgtgatttt

SEQ ID NO: 1213 - RNA, 21 nt, synthetic construct
  modified_base 20..21: mod_base = OTHER; note = thymine
  modified_base 1: mod_base = um
  modified_base 2: mod_base = OTHER; note = adenosine
  modified_base 3: mod_base = OTHER; note = guanosine
  modified_base 4: mod_base = OTHER; note = guanosine
  modified_base 5: mod_base = OTHER; note = adenosine
  modified_base 6: mod_base = OTHER; note = adenosine
  modified_base 7: mod_base = OTHER; note = adenosine
  modified_base 8: mod_base = um
  modified_base 9: mod_base = OTHER; note = adenosine
  modified_base 10: mod_base = OTHER; note = adenosine
  modified_base 11: mod_base = OTHER; note = adenosine
  modified_base 12: mod_base = um
  modified_base 13: mod_base = OTHER; note = guanosine
  modified_base 14: mod_base = um
  modified_base 15: mod_base = OTHER; note = guanosine
  modified_base 16: mod_base = OTHER; note = adenosine
  modified_base 17: mod_base = um
  modified_base 18: mod_base = um
  modified_base 19: mod_base = um
  modified_base 20: mod_base = OTHER; note = 2'-deoxythymidine
  modified_base 21: mod_base = OTHER; note = 2'-deoxythymidine
  source 1..21: mol_type = other RNA
taggaaataaatgtgattttt

SEQ ID NO: 1214 - RNA, 21 nt, synthetic construct
  modified_base 20..21: mod_base = OTHER; note = thymine
  modified_base 1: mod_base = OTHER; note = adenosine
  modified_base 2: mod_base = OTHER; note = guanosine
  modified_base 3: mod_base = OTHER; note = guanosine
  modified_base 4: mod_base = OTHER; note = adenosine
  modified_base 5: mod_base = OTHER; note = adenosine
  modified_base 6: mod_base = OTHER; note = adenosine
  modified_base 7: mod_base = um
  modified_base 8: mod_base = OTHER; note = adenosine
  modified_base 9: mod_base = OTHER; note = adenosine
  modified_base 10: mod_base = OTHER; note = adenosine
  modified_base 11: mod_base = um
  modified_base 12: mod_base = OTHER; note = guanosine
  modified_base 13: mod_base = um
  modified_base 14: mod_base = OTHER; note = guanosine
  modified_base 15: mod_base = OTHER; note = adenosine
  modified_base 16: mod_base = um
  modified_base 17: mod_base = um
  modified_base 18: mod_base = um
  modified_base 19: mod_base = OTHER; note = guanosine
  modified_base 20: mod_base = OTHER; note = 2'-deoxythymidine
  modified_base 21: mod_base = OTHER; note = 2'-deoxythymidine
  source 1..21: mol_type = other RNA
aggaaataaatgtgatttgtt

SEQ ID NO: 1215 - RNA, 21 nt, synthetic construct
  modified_base 20..21: mod_base = OTHER; note = thymine
  modified_base 1: mod_base = OTHER; note = guanosine
  modified_base 2: mod_base = OTHER; note = guanosine
  modified_base 3: mod_base = OTHER; note = adenosine
  modified_base 4: mod_base = OTHER; note = adenosine
  modified_base 5: mod_base = OTHER; note = adenosine
  modified_base 6: mod_base = um
  modified_base 7: mod_base = OTHER; note = adenosine
  modified_base 8: mod_base = OTHER; note = adenosine
  modified_base 9: mod_base = OTHER; note = adenosine
  modified_base 10: mod_base = um
  modified_base 11: mod_base = OTHER; note = guanosine
  modified_base 12: mod_base = um
  modified_base 13: mod_base = OTHER; note = guanosine
  modified_base 14: mod_base = OTHER; note = adenosine
  modified_base 15: mod_base = um
  modified_base 16: mod_base = um
  modified_base 17: mod_base = um
  modified_base 18: mod_base = OTHER; note = guanosine
  modified_base 19: mod_base = cm
  modified_base 20: mod_base = OTHER; note = 2'-deoxythymidine
  modified_base 21: mod_base = OTHER; note = 2'-deoxythymidine
  source 1..21: mol_type = other RNA
ggaaataaatgtgatttgctt

SEQ ID NO: 1216 - RNA, 21 nt, synthetic construct
  modified_base 20..21: mod_base = OTHER; note = thymine
  modified_base 1: mod_base = OTHER; note = guanosine
  modified_base 2: mod_base = OTHER; note = adenosine
  modified_base 3: mod_base = OTHER; note = adenosine
  modified_base 4: mod_base = OTHER; note = adenosine
  modified_base 5: mod_base = um
  modified_base 6: mod_base = OTHER; note = adenosine
  modified_base 7: mod_base = OTHER; note = adenosine
  modified_base 8: mod_base = OTHER; note = adenosine
  modified_base 9: mod_base = um
  modified_base 10: mod_base = OTHER; note = guanosine
  modified_base 11: mod_base = um
  modified_base 12: mod_base = OTHER; note = guanosine
  modified_base 13: mod_base = OTHER; note = adenosine
  modified_base 14: mod_base = um
  modified_base 15: mod_base = um
  modified_base 16: mod_base = um
  modified_base 17: mod_base = OTHER; note = guanosine
  modified_base 18: mod_base = cm
  modified_base 19: mod_base = cm
  modified_base 20: mod_base = OTHER; note = 2'-deoxythymidine
  modified_base 21: mod_base = OTHER; note = 2'-deoxythymidine
  source 1..21: mol_type = other RNA
gaaataaatgtgatttgcctt

SEQ ID NO: 1217 - RNA, 21 nt, synthetic construct
  modified_base 20..21: mod_base = OTHER; note = thymine
  modified_base 1: mod_base = OTHER; note = adenosine
  modified_base 2: mod_base = OTHER; note = adenosine
  modified_base 3: mod_base = OTHER; note = adenosine
  modified_base 4: mod_base = um
  modified_base 5: mod_base = OTHER; note = adenosine
  modified_base 6: mod_base = OTHER; note = adenosine
  modified_base 7: mod_base = OTHER; note = adenosine
  modified_base 8: mod_base = um
  modified_base 9: mod_base = OTHER; note = guanosine
  modified_base 10: mod_base = um
  modified_base 11: mod_base = OTHER; note = guanosine
  modified_base 12: mod_base = OTHER; note = adenosine
  modified_base 13: mod_base = um
  modified_base 14: mod_base = um
  modified_base 15: mod_base = um
  modified_base 16: mod_base = OTHER; note = guanosine
  modified_base 17: mod_base = cm
  modified_base 18: mod_base = cm
  modified_base 19: mod_base = um
  modified_base 20: mod_base = OTHER; note = 2'-deoxythymidine
  modified_base 21: mod_base = OTHER; note = 2'-deoxythymidine
  source 1..21: mol_type = other RNA
aaataaatgtgatttgccttt

SEQ ID NO: 1218 - RNA, 21 nt, synthetic construct
  modified_base 20..21: mod_base = OTHER; note = thymine
  modified_base 1: mod_base = OTHER; note = adenosine
  modified_base 2: mod_base = OTHER; note = adenosine
  modified_base 3: mod_base = um
  modified_base 4: mod_base = OTHER; note = adenosine
  modified_base 5: mod_base = OTHER; note = adenosine
  modified_base 6: mod_base = OTHER; note = adenosine
  modified_base 7: mod_base = um
  modified_base 8: mod_base = OTHER; note = guanosine
  modified_base 9: mod_base = um
  modified_base 10: mod_base = OTHER; note = guanosine
  modified_base 11: mod_base = OTHER; note = adenosine
  modified_base 12: mod_base = um
  modified_base 13: mod_base = um
  modified_base 14: mod_base = um
  modified_base 15: mod_base = OTHER; note = guanosine
  modified_base 16: mod_base = cm
  modified_base 17: mod_base = cm
  modified_base 18: mod_base = um
  modified_base 19: mod_base = um
  modified_base 20: mod_base = OTHER; note = 2'-deoxythymidine
  modified_base 21: mod_base = OTHER; note = 2'-deoxythymidine
  source 1..21: mol_type = other RNA
aataaatgtgatttgcctttt

SEQ ID NO: 1219 - RNA, 21 nt, synthetic construct
  modified_base 20..21: mod_base = OTHER; note = thymine
  modified_base 1: mod_base = OTHER; note = adenosine
  modified_base 2: mod_base = um
  modified_base 3: mod_base = OTHER; note = adenosine
  modified_base 4: mod_base = OTHER; note = adenosine
  modified_base 5: mod_base = OTHER; note = adenosine
  modified_base 6: mod_base = um
  modified_base 7: mod_base = OTHER; note = guanosine
  modified_base 8: mod_base = um
  modified_base 9: mod_base = OTHER; note = guanosine
  modified_base 10: mod_base = OTHER; note = adenosine
  modified_base 11: mod_base = um
  modified_base 12: mod_base = um
  modified_base 13: mod_base = um
  modified_base 14: mod_base = OTHER; note = guanosine
  modified_base 15: mod_base = cm
  modified_base 16: mod_base = cm
  modified_base 17: mod_base = um
  modified_base 18: mod_base = um
  modified_base 19: mod_base = cm
  modified_base 20: mod_base = OTHER; note = 2'-deoxythymidine
  modified_base 21: mod_base = OTHER; note = 2'-deoxythymidine
  source 1..21: mol_type = other RNA
ataaatgtgatttgccttctt

SEQ ID NO: 1220 - RNA, 21 nt, synthetic construct
  modified_base 20..21: mod_base = OTHER; note = thymine
  modified_base 1: mod_base = um
  modified_base 2: mod_base = OTHER; note = adenosine
  modified_base 3: mod_base = OTHER; note = adenosine
  modified_base 4: mod_base = OTHER; note = adenosine
  modified_base 5: mod_base = um
  modified_base 6: mod_base = OTHER; note = guanosine
  modified_base 7: mod_base = um
  modified_base 8: mod_base = OTHER; note = guanosine
  modified_base 9: mod_base = OTHER; note = adenosine
  modified_base 10: mod_base = um
  modified_base 11: mod_base = um
  modified_base 12: mod_base = um
  modified_base 13: mod_base = OTHER; note = guanosine
  modified_base 14: mod_base = cm
  modified_base 15: mod_base = cm
  modified_base 16: mod_base = um
  modified_base 17: mod_base = um
  modified_base 18: mod_base = cm
  modified_base 19: mod_base = um
  modified_base 20: mod_base = OTHER; note = 2'-deoxythymidine
  modified_base 21: mod_base = OTHER; note = 2'-deoxythymidine
  source 1..21: mol_type = other RNA
taaatgtgatttgccttcttt

SEQ ID NO: 1221 - RNA, 21 nt, synthetic construct
  modified_base 20..21: mod_base = OTHER; note = thymine
  modified_base 1: mod_base = OTHER; note = adenosine
  modified_base 2: mod_base = OTHER; note = adenosine
  modified_base 3: mod_base = OTHER; note = adenosine
  modified_base 4: mod_base = um
  modified_base 5: mod_base = OTHER; note = guanosine
  modified_base 6: mod_base = um
  modified_base 7: mod_base = OTHER; note = guanosine
  modified_base 8: mod_base = OTHER; note = adenosine
  modified_base 9: mod_base = um
  modified_base 10: mod_base = um
  modified_base 11: mod_base = um
  modified_base 12: mod_base = OTHER; note = guanosine
  modified_base 13: mod_base = cm
  modified_base 14: mod_base = cm
  modified_base 15: mod_base = um
  modified_base 16: mod_base = um
  modified_base 17: mod_base = cm
  modified_base 18: mod_base = um
  modified_base 19: mod_base = OTHER; note = adenosine
  modified_base 20: mod_base = OTHER; note = 2'-deoxythymidine
  modified_base 21: mod_base = OTHER; note = 2'-deoxythymidine
  source 1..21: mol_type = other RNA
aaatgtgatttgccttctatt

SEQ ID NO: 1222 - RNA, 21 nt, synthetic construct
  modified_base 20..21: mod_base = OTHER; note = thymine
  modified_base 1: mod_base = OTHER; note = adenosine
  modified_base 2: mod_base = OTHER; note = adenosine
  modified_base 3: mod_base = um
  modified_base 4: mod_base = OTHER; note = guanosine
  modified_base 5: mod_base = um
  modified_base 6: mod_base = OTHER; note = guanosine
  modified_base 7: mod_base = OTHER; note = adenosine
  modified_base 8: mod_base = um
  modified_base 9: mod_base = um
  modified_base 10: mod_base = um
  modified_base 11: mod_base = OTHER; note = guanosine
  modified_base 12: mod_base = cm
  modified_base 13: mod_base = cm
  modified_base 14: mod_base = um
  modified_base 15: mod_base = um
  modified_base 16: mod_base = cm
  modified_base 17: mod_base = um
  modified_base 18: mod_base = OTHER; note = adenosine
  modified_base 19: mod_base = OTHER; note = guanosine
  modified_base 20: mod_base = OTHER; note = 2'-deoxythymidine
  modified_base 21: mod_base = OTHER; note = 2'-deoxythymidine
  source 1..21: mol_type = other RNA
aatgtgatttgccttctagtt

SEQ ID NO: 1223 - RNA, 21 nt, synthetic construct
  modified_base 20..21: mod_base = OTHER; note = thymine
  modified_base 1: mod_base = OTHER; note = adenosine
  modified_base 2: mod_base = um
  modified_base 3: mod_base = OTHER; note = guanosine
  modified_base 4: mod_base = um
  modified_base 5: mod_base = OTHER; note = guanosine
  modified_base 6: mod_base = OTHER; note = adenosine
  modified_base 7: mod_base = um
  modified_base 8: mod_base = um
  modified_base 9: mod_base = um
  modified_base 10: mod_base = OTHER; note = guanosine
  modified_base 11: mod_base = cm
  modified_base 12: mod_base = cm
  modified_base 13: mod_base = um
  modified_base 14: mod_base = um
  modified_base 15: mod_base = cm
  modified_base 16: mod_base = um
  modified_base 17: mod_base = OTHER; note = adenosine
  modified_base 18: mod_base = OTHER; note = guanosine
  modified_base 19: mod_base = OTHER; note = adenosine
  modified_base 20: mod_base = OTHER; note = 2'-deoxythymidine
  modified_base 21: mod_base = OTHER; note = 2'-deoxythymidine
  source 1..21: mol_type = other RNA
atgtgatttgccttctagatt

SEQ ID NO: 1224 - RNA, 21 nt, synthetic construct
  modified_base 20..21: mod_base = OTHER; note = thymine
  modified_base 1: mod_base = um
  modified_base 2: mod_base = OTHER; note = guanosine
  modified_base 3: mod_base = um
  modified_base 4: mod_base = OTHER; note = guanosine
  modified_base 5: mod_base = OTHER; note = adenosine
  modified_base 6: mod_base = um
  modified_base 7: mod_base = um
  modified_base 8: mod_base = um
  modified_base 9: mod_base = OTHER; note = guanosine
  modified_base 10: mod_base = cm
  modified_base 11: mod_base = cm
  modified_base 12: mod_base = um
  modified_base 13: mod_base = um
  modified_base 14: mod_base = cm
  modified_base 15: mod_base = um
  modified_base 16: mod_base = OTHER; note = adenosine
  modified_base 17: mod_base = OTHER; note = guanosine
  modified_base 18: mod_base = OTHER; note = adenosine
  modified_base 19: mod_base = OTHER; note = adenosine
  modified_base 20: mod_base = OTHER; note = 2'-deoxythymidine
  modified_base 21: mod_base = OTHER; note = 2'-deoxythymidine
  source 1..21: mol_type = other RNA
tgtgatttgccttctagaatt

SEQ ID NO: 1225 - RNA, 21 nt, synthetic construct
  modified_base 20..21: mod_base = OTHER; note = thymine
  modified_base 1: mod_base = OTHER; note = guanosine
  modified_base 2: mod_base = um
  modified_base 3: mod_base = OTHER; note = guanosine
  modified_base 4: mod_base = OTHER; note = adenosine
  modified_base 5: mod_base = um
  modified_base 6: mod_base = um
  modified_base 7: mod_base = um
  modified_base 8: mod_base = OTHER; note = guanosine
  modified_base 9: mod_base = cm
  modified_base 10: mod_base = cm
  modified_base 11: mod_base = um
  modified_base 12: mod_base = um
  modified_base 13: mod_base = cm
  modified_base 14: mod_base = um
  modified_base 15: mod_base = OTHER; note = adenosine
  modified_base 16: mod_base = OTHER; note = guanosine
  modified_base 17: mod_base = OTHER; note = adenosine
  modified_base 18: mod_base = OTHER; note = adenosine
  modified_base 19: mod_base = cm
  modified_base 20: mod_base = OTHER; note = 2'-deoxythymidine
  modified_base 21: mod_base = OTHER; note = 2'-deoxythymidine
  source 1..21: mol_type = other RNA
gtgatttgccttctagaactt

SEQ ID NO: 1226 - RNA, 21 nt, synthetic construct
  modified_base 20..21: mod_base = OTHER; note = thymine
  modified_base 1: mod_base = um
  modified_base 2: mod_base = OTHER; note = guanosine
  modified_base 3: mod_base = OTHER; note = adenosine
  modified_base 4: mod_base = um
  modified_base 5: mod_base = um
  modified_base 6: mod_base = um
  modified_base 7: mod_base = OTHER; note = guanosine
  modified_base 8: mod_base = cm
  modified_base 9: mod_base = cm
  modified_base 10: mod_base = um
  modified_base 11: mod_base = um
  modified_base 12: mod_base = cm
  modified_base 13: mod_base = um
  modified_base 14: mod_base = OTHER; note = adenosine
  modified_base 15: mod_base = OTHER; note = guanosine
  modified_base 16: mod_base = OTHER; note = adenosine
  modified_base 17: mod_base = OTHER; note = adenosine
  modified_base 18: mod_base = cm
  modified_base 19: mod_base = OTHER; note = adenosine
  modified_base 20: mod_base = OTHER; note = 2'-deoxythymidine
  modified_base 21: mod_base = OTHER; note = 2'-deoxythymidine
  source 1..21: mol_type = other RNA
tgatttgccttctagaacatt

SEQ ID NO: 1227 - RNA, 21 nt, synthetic construct
  modified_base 20..21: mod_base = OTHER; note = thymine
  modified_base 1: mod_base = OTHER; note = guanosine
  modified_base 2: mod_base = OTHER; note = adenosine
  modified_base 3: mod_base = um
  modified_base 4: mod_base = um
  modified_base 5: mod_base = um
  modified_base 6: mod_base = OTHER; note = guanosine
  modified_base 7: mod_base = cm
  modified_base 8: mod_base = cm
  modified_base 9: mod_base = um
  modified_base 10: mod_base = um
  modified_base 11: mod_base = cm
  modified_base 12: mod_base = um
  modified_base 13: mod_base = OTHER; note = adenosine
  modified_base 14: mod_base = OTHER; note = guanosine
  modified_base 15: mod_base = OTHER; note = adenosine
  modified_base 16: mod_base = OTHER; note = adenosine
  modified_base 17: mod_base = cm
  modified_base 18: mod_base = OTHER; note = adenosine
  modified_base 19: mod_base = OTHER; note = guanosine
  modified_base 20: mod_base = OTHER; note = 2'-deoxythymidine
  modified_base 21: mod_base = OTHER; note = 2'-deoxythymidine
  source 1..21: mol_type = other RNA
gatttgccttctagaacagtt

SEQ ID NO: 1228 - RNA, 21 nt, synthetic construct
  modified_base 20..21: mod_base = OTHER; note = thymine
  modified_base 1: mod_base = OTHER; note = adenosine
  modified_base 2: mod_base = um
  modified_base 3: mod_base = um
  modified_base 4: mod_base = um
  modified_base 5: mod_base = OTHER; note = guanosine
  modified_base 6: mod_base = cm
  modified_base 7: mod_base = cm
  modified_base 8: mod_base = um
  modified_base 9: mod_base = um
  modified_base 10: mod_base = cm
  modified_base 11: mod_base = um
  modified_base 12: mod_base = OTHER; note = adenosine
  modified_base 13: mod_base = OTHER; note = guanosine
  modified_base 14: mod_base = OTHER; note = adenosine
  modified_base 15: mod_base = OTHER; note = adenosine
  modified_base 16: mod_base = cm
  modified_base 17: mod_base = OTHER; note = adenosine
  modified_base 18: mod_base = OTHER; note = guanosine
  modified_base 19: mod_base = um
  modified_base 20: mod_base = OTHER; note = 2'-deoxythymidine
  modified_base 21: mod_base = OTHER; note = 2'-deoxythymidine
  source 1..21: mol_type = other RNA
atttgccttctagaacagttt

SEQ ID NO: 1229 - RNA, 21 nt, synthetic construct
  modified_base 20..21: mod_base = OTHER; note = thymine
  modified_base 1: mod_base = um
  modified_base 2: mod_base = um
  modified_base 3: mod_base = um
  modified_base 4: mod_base = OTHER; note = guanosine
  modified_base 5: mod_base = cm
  modified_base 6: mod_base = cm
  modified_base 7: mod_base = um
  modified_base 8: mod_base = um
  modified_base 9: mod_base = cm
  modified_base 10: mod_base = um
  modified_base 11: mod_base = OTHER; note = adenosine
  modified_base 12: mod_base = OTHER; note = guanosine
  modified_base 13: mod_base = OTHER; note = adenosine
  modified_base 14: mod_base = OTHER; note = adenosine
  modified_base 15: mod_base = cm
  modified_base 16: mod_base = OTHER; note = adenosine
  modified_base 17: mod_base = OTHER; note = guanosine
  modified_base 18: mod_base = um
  modified_base 19: mod_base = OTHER; note = adenosine
  modified_base 20: mod_base = OTHER; note = 2'-deoxythymidine
  modified_base 21: mod_base = OTHER; note = 2'-deoxythymidine
  source 1..21: mol_type = other RNA
tttgccttctagaacagtatt

SEQ ID NO: 1230 - RNA, 21 nt, synthetic construct
  modified_base 20..21: mod_base = OTHER; note = thymine
  modified_base 1: mod_base = um
  modified_base 2: mod_base = OTHER; note = guanosine
  modified_base 3: mod_base = cm
  modified_base 4: mod_base = cm
  modified_base 5: mod_base = um
  modified_base 6: mod_base = um
  modified_base 7: mod_base = cm
  modified_base 8: mod_base = um
  modified_base 9: mod_base = OTHER; note = adenosine
  modified_base 10: mod_base = OTHER; note = guanosine
  modified_base 11: mod_base = OTHER; note = adenosine
  modified_base 12: mod_base = OTHER; note = adenosine
  modified_base 13: mod_base = cm
  modified_base 14: mod_base = OTHER; note = adenosine
  modified_base 15: mod_base = OTHER; note = guanosine
  modified_base 16: mod_base = um
  modified_base 17: mod_base = OTHER; note = adenosine
  modified_base 18: mod_base = OTHER; note = guanosine
  modified_base 19: mod_base = OTHER; note = adenosine
  modified_base 20: mod_base = OTHER; note = 2'-deoxythymidine
  modified_base 21: mod_base = OTHER; note = 2'-deoxythymidine
  source 1..21: mol_type = other RNA
tgccttctagaacagtagatt

SEQ ID NO: 1231 - RNA, 21 nt, synthetic construct
  modified_base 20..21: mod_base = OTHER; note = thymine
  modified_base 1: mod_base = OTHER; note = guanosine
  modified_base 2: mod_base = cm
  modified_base 3: mod_base = cm
  modified_base 4: mod_base = um
  modified_base 5: mod_base = um
  modified_base 6: mod_base = cm
  modified_base 7: mod_base = um
  modified_base 8: mod_base = OTHER; note = adenosine
  modified_base 9: mod_base = OTHER; note = guanosine
  modified_base 10: mod_base = OTHER; note = adenosine
  modified_base 11: mod_base = OTHER; note = adenosine
  modified_base 12: mod_base = cm
  modified_base 13: mod_base = OTHER; note = adenosine
  modified_base 14: mod_base = OTHER; note = guanosine
  modified_base 15: mod_base = um
  modified_base 16: mod_base = OTHER; note = adenosine
  modified_base 17: mod_base = OTHER; note = guanosine
  modified_base 18: mod_base = OTHER; note = adenosine
  modified_base 19: mod_base = cm
  modified_base 20: mod_base = OTHER; note = 2'-deoxythymidine
  modified_base 21: mod_base = OTHER; note = 2'-deoxythymidine
  source 1..21: mol_type = other RNA
gccttctagaacagtagactt

SEQ ID NO: 1232 - RNA, 21 nt, synthetic construct
  modified_base 20..21: mod_base = OTHER; note = thymine
  modified_base 1: mod_base = cm
  modified_base 2: mod_base = cm
  modified_base 3: mod_base = um
  modified_base 4: mod_base = um
  modified_base 5: mod_base = cm
  modified_base 6: mod_base = um
  modified_base 7: mod_base = OTHER; note = adenosine
  modified_base 8: mod_base = OTHER; note = guanosine
  modified_base 9: mod_base = OTHER; note = adenosine
  modified_base 10: mod_base = OTHER; note = adenosine
  modified_base 11: mod_base = cm
  modified_base 12: mod_base = OTHER; note = adenosine
  modified_base 13: mod_base = OTHER; note = guanosine
  modified_base 14: mod_base = um
  modified_base 15: mod_base = OTHER; note = adenosine
  modified_base 16: mod_base = OTHER; note = guanosine
  modified_base 17: mod_base = OTHER; note = adenosine
  modified_base 18: mod_base = cm
  modified_base 19: mod_base = OTHER; note = adenosine
  modified_base 20: mod_base = OTHER; note = 2'-deoxythymidine
  modified_base 21: mod_base = OTHER; note = 2'-deoxythymidine
  source 1..21: mol_type = other RNA
ccttctagaacagtagacatt

SEQ ID NO: 1233 - RNA, 21 nt, synthetic construct
  modified_base 20..21: mod_base = OTHER; note = thymine
  modified_base 1: mod_base = cm
  modified_base 2: mod_base = um
  modified_base 3: mod_base = um
  modified_base 4: mod_base = cm
  modified_base 5: mod_base = um
  modified_base 6: mod_base = OTHER; note = adenosine
  modified_base 7: mod_base = OTHER; note = guanosine
  modified_base 8: mod_base = OTHER; note = adenosine
  modified_base 9: mod_base = OTHER; note = adenosine
  modified_base 10: mod_base = cm
  modified_base 11: mod_base = OTHER; note = adenosine
  modified_base 12: mod_base = OTHER; note = guanosine
  modified_base 13: mod_base = um
  modified_base 14: mod_base = OTHER; note = adenosine
  modified_base 15: mod_base = OTHER; note = guanosine
  modified_base 16: mod_base = OTHER; note = adenosine
  modified_base 17: mod_base = cm
  modified_base 18: mod_base = OTHER; note = adenosine
  modified_base 19: mod_base = cm
  modified_base 20: mod_base = OTHER; note = 2'-deoxythymidine
  modified_base 21: mod_base = OTHER; note = 2'-deoxythymidine
  source 1..21: mol_type = other RNA
cttctagaacagtagacactt

SEQ ID NO: 1234 - RNA, 21 nt, synthetic construct
  modified_base 20..21: mod_base = OTHER; note = thymine
  modified_base 1: mod_base = um
  modified_base 2: mod_base = um
  modified_base 3: mod_base = cm
  modified_base 4: mod_base = um
  modified_base 5: mod_base = OTHER; note = adenosine
  modified_base 6: mod_base = OTHER; note = guanosine
  modified_base 7: mod_base = OTHER; note = adenosine
  modified_base 8: mod_base = OTHER; note = adenosine
  modified_base 9: mod_base = cm
  modified_base 10: mod_base = OTHER; note = adenosine
  modified_base 11: mod_base = OTHER; note = guanosine
  modified_base 12: mod_base = um
  modified_base 13: mod_base = OTHER; note = adenosine
  modified_base 14: mod_base = OTHER; note = guanosine
  modified_base 15: mod_base = OTHER; note = adenosine
  modified_base 16: mod_base = cm
  modified_base 17: mod_base = OTHER; note = adenosine
  modified_base 18: mod_base = cm
  modified_base 19: mod_base = OTHER; note = adenosine
  modified_base 20: mod_base = OTHER; note = 2'-deoxythymidine
  modified_base 21: mod_base = OTHER; note = 2'-deoxythymidine
  source 1..21: mol_type = other RNA
ttctagaacagtagacacatt

SEQ ID NO: 1235 - RNA, 21 nt, synthetic construct
  modified_base 20..21: mod_base = OTHER; note = thymine
  modified_base 1: mod_base = um
  modified_base 2: mod_base = cm
  modified_base 3: mod_base = um
  modified_base 4: mod_base = OTHER; note = adenosine
  modified_base 5: mod_base = OTHER; note = guanosine
  modified_base 6: mod_base = OTHER; note = adenosine
  modified_base 7: mod_base = OTHER; note = adenosine
  modified_base 8: mod_base = cm
  modified_base 9: mod_base = OTHER; note = adenosine
  modified_base 10: mod_base = OTHER; note = guanosine
  modified_base 11: mod_base = um
  modified_base 12: mod_base = OTHER; note = adenosine
  modified_base 13: mod_base = OTHER; note = guanosine
  modified_base 14: mod_base = OTHER; note = adenosine
  modified_base 15: mod_base = cm
  modified_base 16: mod_base = OTHER; note = adenosine
  modified_base 17: mod_base = cm
  modified_base 18: mod_base = OTHER; note = adenosine
  modified_base 19: mod_base = OTHER; note = adenosine
  modified_base 20: mod_base = OTHER; note = 2'-deoxythymidine
  modified_base 21: mod_base = OTHER; note = 2'-deoxythymidine
  source 1..21: mol_type = other RNA
tctagaacagtagacacaatt

SEQ ID NO: 1236 - RNA, 21 nt, synthetic construct
  modified_base 20..21: mod_base = OTHER; note = thymine
  modified_base 1: mod_base = cm
  modified_base 2: mod_base = um
  modified_base 3: mod_base = OTHER; note = adenosine
  modified_base 4: mod_base = OTHER; note = guanosine
  modified_base 5: mod_base = OTHER; note = adenosine
  modified_base 6: mod_base = OTHER; note = adenosine
  modified_base 7: mod_base = cm
  modified_base 8: mod_base = OTHER; note = adenosine
  modified_base 9: mod_base = OTHER; note = guanosine
  modified_base 10: mod_base = um
  modified_base 11: mod_base = OTHER; note = adenosine
  modified_base 12: mod_base = OTHER; note = guanosine
  modified_base 13: mod_base = OTHER; note = adenosine
  modified_base 14: mod_base = cm
  modified_base 15: mod_base = OTHER; note = adenosine
  modified_base 16: mod_base = cm
  modified_base 17: mod_base = OTHER; note = adenosine
  modified_base 18: mod_base = OTHER; note = adenosine
  modified_base 19: mod_base = OTHER; note = adenosine
  modified_base 20: mod_base = OTHER; note = 2'-deoxythymidine
  modified_base 21: mod_base = OTHER; note = 2'-deoxythymidine
  source 1..21: mol_type = other RNA
ctagaacagtagacacaaatt

SEQ ID NO: 1237 - RNA, 21 nt, synthetic construct
  modified_base 20..21: mod_base = OTHER; note = thymine
  modified_base 1: mod_base = um
  modified_base 2: mod_base = OTHER; note = adenosine
  modified_base 3: mod_base = OTHER; note = guanosine
  modified_base 4: mod_base = OTHER; note = adenosine
  modified_base 5: mod_base = OTHER; note = adenosine
  modified_base 6: mod_base = cm
  modified_base 7: mod_base = OTHER; note = adenosine
  modified_base 8: mod_base = OTHER; note = guanosine
  modified_base 9: mod_base = um
  modified_base 10: mod_base = OTHER; note = adenosine
  modified_base 11: mod_base = OTHER; note = guanosine
  modified_base 12: mod_base = OTHER; note = adenosine
  modified_base 13: mod_base = cm
  modified_base 14: mod_base = OTHER; note = adenosine
  modified_base 15: mod_base = cm
  modified_base 16: mod_base = OTHER; note = adenosine
  modified_base 17: mod_base = OTHER; note = adenosine
  modified_base 18: mod_base = OTHER; note = adenosine
  modified_base 19: mod_base = OTHER; note = adenosine
  modified_base 20: mod_base = OTHER; note = 2'-deoxythymidine
  modified_base 21: mod_base = OTHER; note = 2'-deoxythymidine
  source 1..21: mol_type = other RNA
tagaacagtagacacaaaatt

SEQ ID NO: 1238 - RNA, 21 nt, synthetic construct
  modified_base 20..21: mod_base = OTHER; note = thymine
  modified_base 1: mod_base = OTHER; note = adenosine
  modified_base 2: mod_base = OTHER; note = guanosine
  modified_base 3: mod_base = OTHER; note = adenosine
  modified_base 4: mod_base = OTHER; note = adenosine
  modified_base 5: mod_base = cm
  modified_base 6: mod_base = OTHER; note = adenosine
  modified_base 7: mod_base = OTHER; note = guanosine
  modified_base 8: mod_base = um
  modified_base 9: mod_base = OTHER; note = adenosine
  modified_base 10: mod_base = OTHER; note = guanosine
  modified_base 11: mod_base = OTHER; note = adenosine
  modified_base 12: mod_base = cm
  modified_base 13: mod_base = OTHER; note = adenosine
  modified_base 14: mod_base = cm
  modified_base 15: mod_base = OTHER; note = adenosine
  modified_base 16: mod_base = OTHER; note = adenosine
  modified_base 17: mod_base = OTHER; note = adenosine
  modified_base 18: mod_base = OTHER; note = adenosine
  modified_base 19: mod_base = cm
  modified_base 20: mod_base = OTHER; note = 2'-deoxythymidine
  modified_base 21: mod_base = OTHER; note = 2'-deoxythymidine
  source 1..21: mol_type = other RNA
agaacagtagacacaaaactt

SEQ ID NO: 1239 - RNA, 21 nt, synthetic construct
  modified_base 20..21: mod_base = OTHER; note = thymine
  modified_base 1: mod_base = OTHER; note = guanosine
  modified_base 2: mod_base = OTHER; note = adenosine
  modified_base 3: mod_base = OTHER; note = adenosine
  modified_base 4: mod_base = cm
  modified_base 5: mod_base = OTHER; note = adenosine
  modified_base 6: mod_base = OTHER; note = guanosine
  modified_base 7: mod_base = um
  modified_base 8: mod_base = OTHER; note = adenosine
  modified_base 9: mod_base = OTHER; note = guanosine
  modified_base 10: mod_base = OTHER; note = adenosine
  modified_base 11: mod_base = cm
  modified_base 12: mod_base = OTHER; note = adenosine
  modified_base 13: mod_base = cm
  modified_base 14: mod_base = OTHER; note = adenosine
  modified_base 15: mod_base = OTHER; note = adenosine
  modified_base 16: mod_base = OTHER; note = adenosine
  modified_base 17: mod_base = OTHER; note = adenosine
  modified_base 18: mod_base = cm
  modified_base 19: mod_base = OTHER; note = adenosine
  modified_base 20: mod_base = OTHER; note = 2'-deoxythymidine
  modified_base 21: mod_base = OTHER; note = 2'-deoxythymidine
  source 1..21: mol_type = other RNA
gaacagtagacacaaaacatt

SEQ ID NO: 1240 - RNA, 21 nt, synthetic construct
  modified_base 20..21: mod_base = OTHER; note = thymine
  modified_base 1: mod_base = OTHER; note = adenosine
  modified_base 2: mod_base = OTHER; note = adenosine
  modified_base 3: mod_base = cm
  modified_base 4: mod_base = OTHER; note = adenosine
  modified_base 5: mod_base = OTHER; note = guanosine
  modified_base 6: mod_base = um
  modified_base 7: mod_base = OTHER; note = adenosine
  modified_base 8: mod_base = OTHER; note = guanosine
  modified_base 9: mod_base = OTHER; note = adenosine
  modified_base 10: mod_base = cm
  modified_base 11: mod_base = OTHER; note = adenosine
  modified_base 12: mod_base = cm
  modified_base 13: mod_base = OTHER; note = adenosine
  modified_base 14: mod_base = OTHER; note = adenosine
  modified_base 15: mod_base = OTHER; note = adenosine
  modified_base 16: mod_base = OTHER; note = adenosine
  modified_base 17: mod_base = cm
  modified_base 18: mod_base = OTHER; note = adenosine
  modified_base 19: mod_base = OTHER; note = guanosine
  modified_base 20: mod_base = OTHER; note = 2'-deoxythymidine
  modified_base 21: mod_base = OTHER; note = 2'-deoxythymidine
  source 1..21: mol_type = other RNA
aacagtagacacaaaacagtt

SEQ ID NO: 1241 - RNA, 21 nt, synthetic construct
  modified_base 20..21: mod_base = OTHER; note = thymine
  modified_base 1: mod_base = OTHER; note = adenosine
  modified_base 2: mod_base = cm
  modified_base 3: mod_base = OTHER; note = adenosine
  modified_base 4: mod_base = OTHER; note = guanosine
  modified_base 5: mod_base = um
  modified_base 6: mod_base = OTHER; note = adenosine
  modified_base 7: mod_base = OTHER; note = guanosine
  modified_base 8: mod_base = OTHER; note = adenosine
  modified_base 9: mod_base = cm
  modified_base 10: mod_base = OTHER; note = adenosine
  modified_base 11: mod_base = cm
  modified_base 12: mod_base = OTHER; note = adenosine
  modified_base 13: mod_base = OTHER; note = adenosine
  modified_base 14: mod_base = OTHER; note = adenosine
  modified_base 15: mod_base = OTHER; note = adenosine
  modified_base 16: mod_base = cm
  modified_base 17: mod_base = OTHER; note = adenosine
  modified_base 18: mod_base = OTHER; note = guanosine
  modified_base 19: mod_base = OTHER; note = guanosine
  modified_base 20: mod_base = OTHER; note = 2'-deoxythymidine
  modified_base 21: mod_base = OTHER; note = 2'-deoxythymidine
  source 1..21: mol_type = other RNA
acagtagacacaaaacaggtt

SEQ ID NO: 1242 - RNA, 21 nt, synthetic construct
  modified_base 20..21: mod_base = OTHER; note = thymine
  modified_base 1: mod_base = cm
  modified_base 2: mod_base = OTHER; note = adenosine
  modified_base 3: mod_base = OTHER; note = guanosine
  modified_base 4: mod_base = um
  modified_base 5: mod_base = OTHER; note = adenosine
  modified_base 6: mod_base = OTHER; note = guanosine
  modified_base 7: mod_base = OTHER; note = adenosine
  modified_base 8: mod_base = cm
  modified_base 9: mod_base = OTHER; note = adenosine
  modified_base 10: mod_base = cm
  modified_base 11: mod_base = OTHER; note = adenosine
  modified_base 12: mod_base = OTHER; note = adenosine
  modified_base 13: mod_base = OTHER; note = adenosine
  modified_base 14: mod_base = OTHER; note = adenosine
  modified_base 15: mod_base = cm
  modified_base 16: mod_base = OTHER; note = adenosine
  modified_base 17: mod_base = OTHER; note = guanosine
  modified_base 18: mod_base = OTHER; note = guanosine
  modified_base 19: mod_base = cm
  modified_base 20: mod_base = OTHER; note = 2'-deoxythymidine
  modified_base 21: mod_base = OTHER; note = 2'-deoxythymidine
  source 1..21: mol_type = other RNA
cagtagacacaaaacaggctt

SEQ ID NO: 1243 - RNA, 21 nt, synthetic construct
  modified_base 20..21: mod_base = OTHER; note = thymine
  modified_base 1: mod_base = OTHER; note = adenosine
  modified_base 2: mod_base = OTHER; note = guanosine
  modified_base 3: mod_base = um
  modified_base 4: mod_base = OTHER; note = adenosine
  modified_base 5: mod_base = OTHER; note = guanosine
  modified_base 6: mod_base = OTHER; note = adenosine
  modified_base 7: mod_base = cm
  modified_base 8: mod_base = OTHER; note = adenosine
  modified_base 9: mod_base = cm
  modified_base 10: mod_base = OTHER; note = adenosine
  modified_base 11: mod_base = OTHER; note = adenosine
  modified_base 12: mod_base = OTHER; note = adenosine
  modified_base 13: mod_base = OTHER; note = adenosine
  modified_base 14: mod_base = cm
  modified_base 15: mod_base = OTHER; note = adenosine
  modified_base 16: mod_base = OTHER; note = guanosine
  modified_base 17: mod_base = OTHER; note = guanosine
  modified_base 18: mod_base = cm
  modified_base 19: mod_base = um
  modified_base 20: mod_base = OTHER; note = 2'-deoxythymidine
  modified_base 21: mod_base = OTHER; note = 2'-deoxythymidine
  source 1..21: mol_type = other RNA
agtagacacaaaacaggcttt

SEQ ID NO: 1244 - RNA, 21 nt, synthetic construct
  modified_base 20..21: mod_base = OTHER; note = thymine
  modified_base 1: mod_base = OTHER; note = guanosine
  modified_base 2: mod_base = um
  modified_base 3: mod_base = OTHER; note = adenosine
  modified_base 4: mod_base = OTHER; note = guanosine
  modified_base 5: mod_base = OTHER; note = adenosine
  modified_base 6: mod_base = cm
  modified_base 7: mod_base = OTHER; note = adenosine
  modified_base 8: mod_base = cm
  modified_base 9: mod_base = OTHER; note = adenosine
  modified_base 10: mod_base = OTHER; note = adenosine
  modified_base 11: mod_base = OTHER; note = adenosine
  modified_base 12: mod_base = OTHER; note = adenosine
  modified_base 13: mod_base = cm
  modified_base 14: mod_base = OTHER; note = adenosine
  modified_base 15: mod_base = OTHER; note = guanosine
  modified_base 16: mod_base = OTHER; note = guanosine
  modified_base 17: mod_base = cm
  modified_base 18: mod_base = um
  modified_base 19: mod_base = cm
  modified_base 20: mod_base = OTHER; note = 2'-deoxythymidine
  modified_base 21: mod_base = OTHER; note = 2'-deoxythymidine
  source 1..21: mol_type = other RNA
gtagacacaaaacaggctctt

SEQ ID NO: 1245 - RNA, 21 nt, synthetic construct
  modified_base 20..21: mod_base = OTHER; note = thymine
  modified_base 1: mod_base = um
  modified_base 2: mod_base = OTHER; note = adenosine
  modified_base 3: mod_base = OTHER; note = guanosine
  modified_base 4: mod_base = OTHER; note = adenosine
  modified_base 5: mod_base = cm
  modified_base 6: mod_base = OTHER; note = adenosine
  modified_base 7: mod_base = cm
  modified_base 8: mod_base = OTHER; note = adenosine
  modified_base 9: mod_base = OTHER; note = adenosine
  modified_base 10: mod_base = OTHER; note = adenosine
  modified_base 11: mod_base = OTHER; note = adenosine
  modified_base 12: mod_base = cm
  modified_base 13: mod_base = OTHER; note = adenosine
  modified_base 14: mod_base = OTHER; note = guanosine
  modified_base 15: mod_base = OTHER; note = guanosine
  modified_base 16: mod_base = cm
  modified_base 17: mod_base = um
  modified_base 18: mod_base = cm
  modified_base 19: mod_base = OTHER; note = adenosine
  modified_base 20: mod_base = OTHER; note = 2'-deoxythymidine
  modified_base 21: mod_base = OTHER; note = 2'-deoxythymidine
  source 1..21: mol_type = other RNA
tagacacaaaacaggctcatt

SEQ ID NO: 1246 - RNA, 21 nt, synthetic construct
  modified_base 20..21: mod_base = OTHER; note = thymine
  modified_base 1: mod_base = OTHER; note = adenosine
  modified_base 2: mod_base = OTHER; note = guanosine
  modified_base 3: mod_base = OTHER; note = adenosine
  modified_base 4: mod_base = cm
  modified_base 5: mod_base = OTHER; note = adenosine
  modified_base 6: mod_base = cm
  modified_base 7: mod_base = OTHER; note = adenosine
  modified_base 8: mod_base = OTHER; note = adenosine
  modified_base 9: mod_base = OTHER; note = adenosine
  modified_base 10: mod_base = OTHER; note = adenosine
  modified_base 11: mod_base = cm
  modified_base 12: mod_base = OTHER; note = adenosine
  modified_base 13: mod_base = OTHER; note = guanosine
  modified_base 14: mod_base = OTHER; note = guanosine
  modified_base 15: mod_base = cm
  modified_base 16: mod_base = um
  modified_base 17: mod_base = cm
  modified_base 18: mod_base = OTHER; note = adenosine
  modified_base 19: mod_base = OTHER; note = guanosine
  modified_base 20: mod_base = OTHER; note = 2'-deoxythymidine
  modified_base 21: mod_base = OTHER; note = 2'-deoxythymidine
  source 1..21: mol_type = other RNA
agacacaaaacaggctcagtt

SEQ ID NO: 1247 - RNA, 21 nt, synthetic construct
  modified_base 20..21: mod_base = OTHER; note = thymine
  modified_base 1: mod_base = OTHER; note = guanosine
  modified_base 2: mod_base = OTHER; note = adenosine
  modified_base 3: mod_base = cm
  modified_base 4: mod_base = OTHER; note = adenosine
  modified_base 5: mod_base = cm
  modified_base 6: mod_base = OTHER; note = adenosine
  modified_base 7: mod_base = OTHER; note = adenosine
  modified_base 8: mod_base = OTHER; note = adenosine
  modified_base 9: mod_base = OTHER; note = adenosine
  modified_base 10: mod_base = cm
  modified_base 11: mod_base = OTHER; note = adenosine
  modified_base 12: mod_base = OTHER; note = guanosine
  modified_base 13: mod_base = OTHER; note = guanosine
  modified_base 14: mod_base = cm
  modified_base 15: mod_base = um
  modified_base 16: mod_base = cm
  modified_base 17: mod_base = OTHER; note = adenosine
  modified_base 18: mod_base = OTHER; note = guanosine
  modified_base 19: mod_base = OTHER; note = guanosine
  modified_base 20: mod_base = OTHER; note = 2'-deoxythymidine
  modified_base 21: mod_base = OTHER; note = 2'-deoxythymidine
  source 1..21: mol_type = other RNA
gacacaaaacaggctcaggtt

SEQ ID NO: 1248 - RNA, 21 nt, synthetic construct
  modified_base 20..21: mod_base = OTHER; note = thymine
  modified_base 1: mod_base = OTHER; note = adenosine
  modified_base 2: mod_base = cm
  modified_base 3: mod_base = OTHER; note = adenosine
  modified_base 4: mod_base = cm
  modified_base 5: mod_base = OTHER; note = adenosine
  modified_base 6: mod_base = OTHER; note = adenosine
  modified_base 7: mod_base = OTHER; note = adenosine
  modified_base 8: mod_base = OTHER; note = adenosine
  modified_base 9: mod_base = cm
  modified_base 10: mod_base = OTHER; note = adenosine
  modified_base 11: mod_base = OTHER; note = guanosine
  modified_base 12: mod_base = OTHER; note = guanosine
  modified_base 13: mod_base = cm
  modified_base 14: mod_base = um
  modified_base 15: mod_base = cm
  modified_base 16: mod_base = OTHER; note = adenosine
  modified_base 17: mod_base = OTHER; note = guanosine
  modified_base 18: mod_base = OTHER; note = guanosine
  modified_base 19: mod_base = OTHER; note = adenosine
  modified_base 20: mod_base = OTHER; note = 2'-deoxythymidine
  modified_base 21: mod_base = OTHER; note = 2'-deoxythymidine
  source 1..21: mol_type = other RNA
acacaaaacaggctcaggatt

SEQ ID NO: 1249 - RNA, 21 nt, synthetic construct
  modified_base 20..21: mod_base = OTHER; note = thymine
  modified_base 1: mod_base = cm
  modified_base 2: mod_base = OTHER; note = adenosine
  modified_base 3: mod_base = cm
  modified_base 4: mod_base = OTHER; note = adenosine
  modified_base 5: mod_base = OTHER; note = adenosine
  modified_base 6: mod_base = OTHER; note = adenosine
  modified_base 7: mod_base = OTHER; note = adenosine
  modified_base 8: mod_base = cm
  modified_base 9: mod_base = OTHER; note = adenosine
  modified_base 10: mod_base = OTHER; note = guanosine
  modified_base 11: mod_base = OTHER; note = guanosine
  modified_base 12: mod_base = cm
  modified_base 13: mod_base = um
  modified_base 14: mod_base = cm
  modified_base 15: mod_base = OTHER; note = adenosine
  modified_base 16: mod_base = OTHER; note = guanosine
  modified_base 17: mod_base = OTHER; note = guanosine
  modified_base 18: mod_base = OTHER; note = adenosine
  modified_base 19: mod_base = cm
  modified_base 20: mod_base = OTHER; note = 2'-deoxythymidine
  modified_base 21: mod_base = OTHER; note = 2'-deoxythymidine
  source 1..21: mol_type = other RNA
cacaaaacaggctcaggactt

SEQ ID NO: 1250 - RNA, 21 nt, synthetic construct
  modified_base 20..21: mod_base = OTHER; note = thymine
  modified_base 1: mod_base = OTHER; note = adenosine
  modified_base 2: mod_base = cm
  modified_base 3: mod_base = OTHER; note = adenosine
  modified_base 4: mod_base = OTHER; note = adenosine
  modified_base 5: mod_base = OTHER; note = adenosine
  modified_base 6: mod_base = OTHER; note = adenosine
  modified_base 7: mod_base = cm
  modified_base 8: mod_base = OTHER; note = adenosine
  modified_base 9: mod_base = OTHER; note = guanosine
  modified_base 10: mod_base = OTHER; note = guanosine
  modified_base 11: mod_base = cm
  modified_base 12: mod_base = um
  modified_base 13: mod_base = cm
  modified_base 14: mod_base = OTHER; note = adenosine
  modified_base 15: mod_base = OTHER; note = guanosine
  modified_base 16: mod_base = OTHER; note = guanosine
  modified_base 17: mod_base = OTHER; note = adenosine
  modified_base 18: mod_base = cm
  modified_base 19: mod_base = um
  modified_base 20: mod_base = OTHER; note = 2'-deoxythymidine
  modified_base 21: mod_base = OTHER; note = 2'-deoxythymidine
  source 1..21: mol_type = other RNA
acaaaacaggctcaggacttt

SEQ ID NO: 1251 - RNA, 21 nt, synthetic construct
  modified_base 20..21: mod_base = OTHER; note = thymine
  modified_base 1: mod_base = cm
  modified_base 2: mod_base = OTHER; note = adenosine
  modified_base 3: mod_base = OTHER; note = adenosine
  modified_base 4: mod_base = OTHER; note = adenosine
  modified_base 5: mod_base = OTHER; note = adenosine
  modified_base 6: mod_base = cm
  modified_base 7: mod_base = OTHER; note = adenosine
  modified_base 8: mod_base = OTHER; note = guanosine
  modified_base 9: mod_base = OTHER; note = guanosine
  modified_base 10: mod_base = cm
  modified_base 11: mod_base = um
  modified_base 12: mod_base = cm
  modified_base 13: mod_base = OTHER; note = adenosine
  modified_base 14: mod_base = OTHER; note = guanosine
  modified_base 15: mod_base = OTHER; note = guanosine
  modified_base 16: mod_base = OTHER; note = adenosine
  modified_base 17: mod_base = cm
  modified_base 18: mod_base = um
  modified_base 19: mod_base = um
  modified_base 20: mod_base = OTHER; note = 2'-deoxythymidine
  modified_base 21: mod_base = OTHER; note = 2'-deoxythymidine
  source 1..21: mol_type = other RNA
caaaacaggctcaggactttt

SEQ ID NO: 1252 - RNA, 21 nt, synthetic construct
  modified_base 20..21: mod_base = OTHER; note = thymine
  modified_base 1: mod_base = OTHER; note = adenosine
  modified_base 2: mod_base = OTHER; note = adenosine
  modified_base 3: mod_base = OTHER; note = adenosine
  modified_base 4: mod_base = OTHER; note = adenosine
  modified_base 5: mod_base = cm
  modified_base 6: mod_base = OTHER; note = adenosine
  modified_base 7: mod_base = OTHER; note = guanosine
  modified_base 8: mod_base = OTHER; note = guanosine
  modified_base 9: mod_base = cm
  modified_base 10: mod_base = um
  modified_base 11: mod_base = cm
  modified_base 12: mod_base = OTHER; note = adenosine
  modified_base 13: mod_base = OTHER; note = guanosine
  modified_base 14: mod_base = OTHER; note = guanosine
  modified_base 15: mod_base = OTHER; note = adenosine
  modified_base 16: mod_base = cm
  modified_base 17: mod_base = um
  modified_base 18: mod_base = um
  modified_base 19: mod_base = OTHER; note = adenosine
  modified_base 20: mod_base = OTHER; note = 2'-deoxythymidine
  modified_base 21: mod_base = OTHER; note = 2'-deoxythymidine
  source 1..21: mol_type = other RNA
aaaacaggctcaggacttatt

SEQ ID NO: 1253 - RNA, 21 nt, synthetic construct
  modified_base 20..21: mod_base = OTHER; note = thymine
  modified_base 1: mod_base = OTHER; note = adenosine
  modified_base 2: mod_base = OTHER; note = adenosine
  modified_base 3: mod_base = OTHER; note = adenosine
  modified_base 4: mod_base = cm
  modified_base 5: mod_base = OTHER; note = adenosine
  modified_base 6: mod_base = OTHER; note = guanosine
  modified_base 7: mod_base = OTHER; note = guanosine
  modified_base 8: mod_base = cm
  modified_base 9: mod_base = um
  modified_base 10: mod_base = cm
  modified_base 11: mod_base = OTHER; note = adenosine
  modified_base 12: mod_base = OTHER; note = guanosine
  modified_base 13: mod_base = OTHER; note = guanosine
  modified_base 14: mod_base = OTHER; note = adenosine
  modified_base 15: mod_base = cm
  modified_base 16: mod_base = um
  modified_base 17: mod_base = um
  modified_base 18: mod_base = OTHER; note = adenosine
  modified_base 19: mod_base = OTHER; note = guanosine
  modified_base 20: mod_base = OTHER; note = 2'-deoxythymidine
  modified_base 21: mod_base = OTHER; note = 2'-deoxythymidine
  source 1..21: mol_type = other RNA
aaacaggctcaggacttagtt

SEQ ID NO: 1254 - RNA, 21 nt, synthetic construct
  modified_base 20..21: mod_base = OTHER; note = thymine
  modified_base 1: mod_base = OTHER; note = adenosine
  modified_base 2: mod_base = OTHER; note = adenosine
  modified_base 3: mod_base = cm
  modified_base 4: mod_base = OTHER; note = adenosine
  modified_base 5: mod_base = OTHER; note = guanosine
  modified_base 6: mod_base = OTHER; note = guanosine
  modified_base 7: mod_base = cm
  modified_base 8: mod_base = um
  modified_base 9: mod_base = cm
  modified_base 10: mod_base = OTHER; note = adenosine
  modified_base 11: mod_base = OTHER; note = guanosine
  modified_base 12: mod_base = OTHER; note = guanosine
  modified_base 13: mod_base = OTHER; note = adenosine
  modified_base 14: mod_base = cm
  modified_base 15: mod_base = um
  modified_base 16: mod_base = um
  modified_base 17: mod_base = OTHER; note = adenosine
  modified_base 18: mod_base = OTHER; note = guanosine
  modified_base 19: mod_base = cm
  modified_base 20: mod_base = OTHER; note = 2'-deoxythymidine
  modified_base 21: mod_base = OTHER; note = 2'-deoxythymidine
  source 1..21: mol_type = other RNA
aacaggctcaggacttagctt

SEQ ID NO: 1255 - RNA, 21 nt, synthetic construct
  modified_base 20..21: mod_base = OTHER; note = thymine
  modified_base 1: mod_base = OTHER; note = adenosine
  modified_base 2: mod_base = cm
  modified_base 3: mod_base = OTHER; note = adenosine
  modified_base 4: mod_base = OTHER; note = guanosine
  modified_base 5: mod_base = OTHER; note = guanosine
  modified_base 6: mod_base = cm
  modified_base 7: mod_base = um
  modified_base 8: mod_base = cm
  modified_base 9: mod_base = OTHER; note = adenosine
  modified_base 10: mod_base = OTHER; note = guanosine
  modified_base 11: mod_base = OTHER; note = guanosine
  modified_base 12: mod_base = OTHER; note = adenosine
  modified_base 13: mod_base = cm
  modified_base 14: mod_base = um
  modified_base 15: mod_base = um
  modified_base 16: mod_base = OTHER; note = adenosine
  modified_base 17: mod_base = OTHER; note = guanosine
  modified_base 18: mod_base = cm
  modified_base 19: mod_base = OTHER; note = adenosine
  modified_base 20: mod_base = OTHER; note = 2'-deoxythymidine
  modified_base 21: mod_base = OTHER; note = 2'-deoxythymidine
  source 1..21: mol_type = other RNA
acaggctcaggacttagcatt

SEQ ID NO: 1256 - RNA, 21 nt, synthetic construct
  modified_base 20..21: mod_base = OTHER; note = thymine
  modified_base 1: mod_base = cm
  modified_base 2: mod_base = OTHER; note = adenosine
  modified_base 3: mod_base = OTHER; note = guanosine
  modified_base 4: mod_base = OTHER; note = guanosine
  modified_base 5: mod_base = cm
  modified_base 6: mod_base = um
  modified_base 7: mod_base = cm
  modified_base 8: mod_base = OTHER; note = adenosine
  modified_base 9: mod_base = OTHER; note = guanosine
  modified_base 10: mod_base = OTHER; note = guanosine
  modified_base 11: mod_base = OTHER; note = adenosine
  modified_base 12: mod_base = cm
  modified_base 13: mod_base = um
  modified_base 14: mod_base = um
  modified_base 15: mod_base = OTHER; note = adenosine
  modified_base 16: mod_base = OTHER; note = guanosine
  modified_base 17: mod_base = cm
  modified_base 18: mod_base = OTHER; note = adenosine
  modified_base 19: mod_base = OTHER; note = adenosine
  modified_base 20: mod_base = OTHER; note = 2'-deoxythymidine
  modified_base 21: mod_base = OTHER; note = 2'-deoxythymidine
  source 1..21: mol_type = other RNA
caggctcaggacttagcaatt

SEQ ID NO: 1257 - RNA, 21 nt, synthetic construct
  modified_base 20..21: mod_base = OTHER; note = thymine
  modified_base 1: mod_base = OTHER; note = adenosine
  modified_base 2: mod_base = OTHER; note = guanosine
  modified_base 3: mod_base = OTHER; note = guanosine
  modified_base 4: mod_base = cm
  modified_base 5: mod_base = um
  modified_base 6: mod_base = cm
  modified_base 7: mod_base = OTHER; note = adenosine
  modified_base 8: mod_base = OTHER; note = guanosine
  modified_base 9: mod_base = OTHER; note = guanosine
  modified_base 10: mod_base = OTHER; note = adenosine
  modified_base 11: mod_base = cm
  modified_base 12: mod_base = um
  modified_base 13: mod_base = um
  modified_base 14: mod_base = OTHER; note = adenosine
  modified_base 15: mod_base = OTHER; note = guanosine
  modified_base 16: mod_base = cm
  modified_base 17: mod_base = OTHER; note = adenosine
  modified_base 18: mod_base = OTHER; note = adenosine
  modified_base 19: mod_base = OTHER; note = guanosine
  modified_base 20: mod_base = OTHER; note = 2'-deoxythymidine
  modified_base 21: mod_base = OTHER; note = 2'-deoxythymidine
  source 1..21: mol_type = other RNA
aggctcaggacttagcaagtt

SEQ ID NO: 1258 - RNA, 21 nt, synthetic construct
  modified_base 20..21: mod_base = OTHER; note = thymine
  modified_base 1: mod_base = OTHER; note = guanosine
  modified_base 2: mod_base = OTHER; note = guanosine
  modified_base 3: mod_base = cm
  modified_base 4: mod_base = um
  modified_base 5: mod_base = cm
  modified_base 6: mod_base = OTHER; note = adenosine
  modified_base 7: mod_base = OTHER; note = guanosine
  modified_base 8: mod_base = OTHER; note = guanosine
  modified_base 9: mod_base = OTHER; note = adenosine
  modified_base 10: mod_base = cm
  modified_base 11: mod_base = um
  modified_base 12: mod_base = um
  modified_base 13: mod_base = OTHER; note = adenosine
  modified_base 14: mod_base = OTHER; note = guanosine
  modified_base 15: mod_base = cm
  modified_base 16: mod_base = OTHER; note = adenosine
  modified_base 17: mod_base = OTHER; note = adenosine
  modified_base 18: mod_base = OTHER; note = guanosine
  modified_base 19: mod_base = OTHER; note = adenosine
  modified_base 20: mod_base = OTHER; note = 2'-deoxythymidine
  modified_base 21: mod_base = OTHER; note = 2'-deoxythymidine
  source 1..21: mol_type = other RNA
ggctcaggacttagcaagatt

SEQ ID NO: 1259 - RNA, 21 nt, synthetic construct
  modified_base 20..21: mod_base = OTHER; note = thymine
  modified_base 1: mod_base = OTHER; note = guanosine
  modified_base 2: mod_base = cm
  modified_base 3: mod_base = um
  modified_base 4: mod_base = cm
  modified_base 5: mod_base = OTHER; note = adenosine
  modified_base 6: mod_base = OTHER; note = guanosine
  modified_base 7: mod_base = OTHER; note = guanosine
  modified_base 8: mod_base = OTHER; note = adenosine
  modified_base 9: mod_base = cm
  modified_base 10: mod_base = um
  modified_base 11: mod_base = um
  modified_base 12: mod_base = OTHER; note = adenosine
  modified_base 13: mod_base = OTHER; note = guanosine
  modified_base 14: mod_base = cm
  modified_base 15: mod_base = OTHER; note = adenosine
  modified_base 16: mod_base = OTHER; note = adenosine
  modified_base 17: mod_base = OTHER; note = guanosine
  modified_base 18: mod_base = OTHER; note = adenosine
  modified_base 19: mod_base = OTHER; note = adenosine
  modified_base 20: mod_base = OTHER; note = 2'-deoxythymidine
  modified_base 21: mod_base = OTHER; note = 2'-deoxythymidine
  source 1..21: mol_type = other RNA
gctcaggacttagcaagaatt

SEQ ID NO: 1260 - RNA, 21 nt, synthetic construct
  modified_base 20..21: mod_base = OTHER; note = thymine
  modified_base 1: mod_base = cm
  modified_base 2: mod_base = um
  modified_base 3: mod_base = cm
  modified_base 4: mod_base = OTHER; note = adenosine
  modified_base 5: mod_base = OTHER; note = guanosine
  modified_base 6: mod_base = OTHER; note = guanosine
  modified_base 7: mod_base = OTHER; note = adenosine
  modified_base 8: mod_base = cm
  modified_base 9: mod_base = um
  modified_base 10: mod_base = um
  modified_base 11: mod_base = OTHER; note = adenosine
  modified_base 12: mod_base = OTHER; note = guanosine
  modified_base 13: mod_base = cm
  modified_base 14: mod_base = OTHER; note = adenosine
  modified_base 15: mod_base = OTHER; note = adenosine
  modified_base 16: mod_base = OTHER; note = guanosine
  modified_base 17: mod_base = OTHER; note = adenosine
  modified_base 18: mod_base = OTHER; note = adenosine
  modified_base 19: mod_base = OTHER; note = guanosine
  modified_base 20: mod_base = OTHER; note = 2'-deoxythymidine
  modified_base 21: mod_base = OTHER; note = 2'-deoxythymidine
  source 1..21: mol_type = other RNA
ctcaggacttagcaagaagtt

SEQ ID NO: 1261 - RNA, 21 nt, synthetic construct
  modified_base 20..21: mod_base = OTHER; note = thymine
  modified_base 1: mod_base = um
  modified_base 2: mod_base = cm
  modified_base 3: mod_base = OTHER; note = adenosine
  modified_base 4: mod_base = OTHER; note = guanosine
  modified_base 5: mod_base = OTHER; note = guanosine
  modified_base 6: mod_base = OTHER; note = adenosine
  modified_base 7: mod_base = cm
  modified_base 8: mod_base = um
  modified_base 9: mod_base = um
  modified_base 10: mod_base = OTHER; note = adenosine
  modified_base 11: mod_base = OTHER; note = guanosine
  modified_base 12: mod_base = cm
  modified_base 13: mod_base = OTHER; note = adenosine
  modified_base 14: mod_base = OTHER; note = adenosine
  modified_base 15: mod_base = OTHER; note = guanosine
  modified_base 16: mod_base = OTHER; note = adenosine
  modified_base 17: mod_base = OTHER; note = adenosine
  modified_base 18: mod_base = OTHER; note = guanosine
  modified_base 19: mod_base = um
  modified_base 20: mod_base = OTHER; note = 2'-deoxythymidine
  modified_base 21: mod_base = OTHER; note = 2'-deoxythymidine
  source 1..21: mol_type = other RNA
tcaggacttagcaagaagttt

SEQ ID NO: 1262 - RNA, 21 nt, synthetic construct
  modified_base 20..21: mod_base = OTHER; note = thymine
  modified_base 1: mod_base = cm
  modified_base 2: mod_base = OTHER; note = adenosine
  modified_base 3: mod_base = OTHER; note = guanosine
  modified_base 4: mod_base = OTHER; note = guanosine
  modified_base 5: mod_base = OTHER; note = adenosine
  modified_base 6: mod_base = cm
  modified_base 7: mod_base = um
  modified_base 8: mod_base = um
  modified_base 9: mod_base = OTHER; note = adenosine
  modified_base 10: mod_base = OTHER; note = guanosine
  modified_base 11: mod_base = cm
  modified_base 12: mod_base = OTHER; note = adenosine
  modified_base 13: mod_base = OTHER; note = adenosine
  modified_base 14: mod_base = OTHER; note = guanosine
  modified_base 15: mod_base = OTHER; note = adenosine
  modified_base 16: mod_base = OTHER; note = adenosine
  modified_base 17: mod_base = OTHER; note = guanosine
  modified_base 18: mod_base = um
  modified_base 19: mod_base = um
  modified_base 20: mod_base = OTHER; note = 2'-deoxythymidine
  modified_base 21: mod_base = OTHER; note = 2'-deoxythymidine
  source 1..21: mol_type = other RNA
caggacttagcaagaagtttt

SEQ ID NO: 1263 - RNA, 21 nt, synthetic construct
  modified_base 20..21: mod_base = OTHER; note = thymine
  modified_base 1: mod_base = OTHER; note = adenosine
  modified_base 2: mod_base = OTHER; note = guanosine
  modified_base 3: mod_base = OTHER; note = guanosine
  modified_base 4: mod_base = OTHER; note = adenosine
  modified_base 5: mod_base = cm
  modified_base 6: mod_base = um
  modified_base 7: mod_base = um
  modified_base 8: mod_base = OTHER; note = adenosine
  modified_base 9: mod_base = OTHER; note = guanosine
  modified_base 10: mod_base = cm
  modified_base 11: mod_base = OTHER; note = adenosine
  modified_base 12: mod_base = OTHER; note = adenosine
  modified_base 13: mod_base = OTHER; note = guanosine
  modified_base 14: mod_base = OTHER; note = adenosine
  modified_base 15: mod_base = OTHER; note = adenosine
  modified_base 16: mod_base = OTHER; note = guanosine
  modified_base 17: mod_base = um
  modified_base 18: mod_base = um
  modified_base 19: mod_base = OTHER; note = adenosine
  modified_base 20: mod_base = OTHER; note = 2'-deoxythymidine
  modified_base 21: mod_base = OTHER; note = 2'-deoxythymidine
  source 1..21: mol_type = other RNA
aggacttagcaagaagttatt

SEQ ID NO: 1264 - RNA, 21 nt, synthetic construct
  modified_base 20..21: mod_base = OTHER; note = thymine
  modified_base 1: mod_base = OTHER; note = guanosine
  modified_base 2: mod_base = OTHER; note = guanosine
  modified_base 3: mod_base = OTHER; note = adenosine
  modified_base 4: mod_base = cm
  modified_base 5: mod_base = um
  modified_base 6: mod_base = um
  modified_base 7: mod_base = OTHER; note = adenosine
  modified_base 8: mod_base = OTHER; note = guanosine
  modified_base 9: mod_base = cm
  modified_base 10: mod_base = OTHER; note = adenosine
  modified_base 11: mod_base = OTHER; note = adenosine
  modified_base 12: mod_base = OTHER; note = guanosine
  modified_base 13: mod_base = OTHER; note = adenosine
  modified_base 14: mod_base = OTHER; note = adenosine
  modified_base 15: mod_base = OTHER; note = guanosine
  modified_base 16: mod_base = um
  modified_base 17: mod_base = um
  modified_base 18: mod_base = OTHER; note = adenosine
  modified_base 19: mod_base = um
  modified_base 20: mod_base = OTHER; note = 2'-deoxythymidine
  modified_base 21: mod_base = OTHER; note = 2'-deoxythymidine
  source 1..21: mol_type = other RNA
ggacttagcaagaagttattt

SEQ ID NO: 1265 - RNA, 21 nt, synthetic construct
  modified_base 20..21: mod_base = OTHER; note = thymine
  modified_base 1: mod_base = OTHER; note = guanosine
  modified_base 2: mod_base = OTHER; note = adenosine
  modified_base 3: mod_base = cm
  modified_base 4: mod_base = um
  modified_base 5: mod_base = um
  modified_base 6: mod_base = OTHER; note = adenosine
  modified_base 7: mod_base = OTHER; note = guanosine
  modified_base 8: mod_base = cm
  modified_base 9: mod_base = OTHER; note = adenosine
  modified_base 10: mod_base = OTHER; note = adenosine
  modified_base 11: mod_base = OTHER; note = guanosine
  modified_base 12: mod_base = OTHER; note = adenosine
  modified_base 13: mod_base = OTHER; note = adenosine
  modified_base 14: mod_base = OTHER; note = guanosine
  modified_base 15: mod_base = um
  modified_base 16: mod_base = um
  modified_base 17: mod_base = OTHER; note = adenosine
  modified_base 18: mod_base = um
  modified_base 19: mod_base = OTHER; note = guanosine
  modified_base 20: mod_base = OTHER; note = 2'-deoxythymidine
  modified_base 21: mod_base = OTHER; note = 2'-deoxythymidine
  source 1..21: mol_type = other RNA
gacttagcaagaagttatgtt

SEQ ID NO: 1266 - RNA, 21 nt, synthetic construct
  modified_base 20..21: mod_base = OTHER; note = thymine
  modified_base 1: mod_base = OTHER; note = adenosine
  modified_base 2: mod_base = cm
  modified_base 3: mod_base = um
  modified_base 4: mod_base = um
  modified_base 5: mod_base = OTHER; note = adenosine
  modified_base 6: mod_base = OTHER; note = guanosine
  modified_base 7: mod_base = cm
  modified_base 8: mod_base = OTHER; note = adenosine
  modified_base 9: mod_base = OTHER; note = adenosine
  modified_base 10: mod_base = OTHER; note = guanosine
  modified_base 11: mod_base = OTHER; note = adenosine
  modified_base 12: mod_base = OTHER; note = adenosine
  modified_base 13: mod_base = OTHER; note = guanosine
  modified_base 14: mod_base = um
  modified_base 15: mod_base = um
  modified_base 16: mod_base = OTHER; note = adenosine
  modified_base 17: mod_base = um
  modified_base 18: mod_base = OTHER; note = guanosine
  modified_base 19: mod_base = OTHER; note = guanosine
  modified_base 20: mod_base = OTHER; note = 2'-deoxythymidine
  modified_base 21: mod_base = OTHER; note = 2'-deoxythymidine
  source 1..21: mol_type = other RNA
acttagcaagaagttatggtt

SEQ ID NO: 1267 - RNA, 21 nt, synthetic construct
  modified_base 20..21: mod_base = OTHER; note = thymine
  modified_base 1: mod_base = cm
  modified_base 2: mod_base = um
  modified_base 3: mod_base = um
  modified_base 4: mod_base = OTHER; note = adenosine
  modified_base 5: mod_base = OTHER; note = guanosine
  modified_base 6: mod_base = cm
  modified_base 7: mod_base = OTHER; note = adenosine
  modified_base 8: mod_base = OTHER; note = adenosine
  modified_base 9: mod_base = OTHER; note = guanosine
  modified_base 10: mod_base = OTHER; note = adenosine
  modified_base 11: mod_base = OTHER; note = adenosine
  modified_base 12: mod_base = OTHER; note = guanosine
  modified_base 13: mod_base = um
  modified_base 14: mod_base = um
  modified_base 15: mod_base = OTHER; note = adenosine
  modified_base 16: mod_base = um
  modified_base 17: mod_base = OTHER; note = guanosine
  modified_base 18: mod_base = OTHER; note = guanosine
  modified_base 19: mod_base = OTHER; note = adenosine
  modified_base 20: mod_base = OTHER; note = 2'-deoxythymidine
  modified_base 21: mod_base = OTHER; note = 2'-deoxythymidine
  source 1..21: mol_type = other RNA
cttagcaagaagttatggatt

SEQ ID NO: 1268 - RNA, 21 nt, synthetic construct
  modified_base 20..21: mod_base = OTHER; note = thymine
  modified_base 1: mod_base = um
  modified_base 2: mod_base = um
  modified_base 3: mod_base = OTHER; note = adenosine
  modified_base 4: mod_base = OTHER; note = guanosine
  modified_base 5: mod_base = cm
  modified_base 6: mod_base = OTHER; note = adenosine
  modified_base 7: mod_base = OTHER; note = adenosine
  modified_base 8: mod_base = OTHER; note = guanosine
  modified_base 9: mod_base = OTHER; note = adenosine
  modified_base 10: mod_base = OTHER; note = adenosine
  modified_base 11: mod_base = OTHER; note = guanosine
  modified_base 12: mod_base = um
  modified_base 13: mod_base = um
  modified_base 14: mod_base = OTHER; note = adenosine
  modified_base 15: mod_base = um
  modified_base 16: mod_base = OTHER; note = guanosine
  modified_base 17: mod_base = OTHER; note = guanosine
  modified_base 18: mod_base = OTHER; note = adenosine
  modified_base 19: mod_base = OTHER; note = adenosine
  modified_base 20: mod_base = OTHER; note = 2'-deoxythymidine
  modified_base 21: mod_base = OTHER; note = 2'-deoxythymidine
  source 1..21: mol_type = other RNA
ttagcaagaagttatggaatt

SEQ ID NO: 1269 - RNA, 21 nt, synthetic construct
  modified_base 20..21: mod_base = OTHER; note = thymine
  modified_base 1: mod_base = um
  modified_base 2: mod_base = OTHER; note = adenosine
  modified_base 3: mod_base = OTHER; note = guanosine
  modified_base 4: mod_base = cm
  modified_base 5: mod_base = OTHER; note = adenosine
  modified_base 6: mod_base = OTHER; note = adenosine
  modified_base 7: mod_base = OTHER; note = guanosine
  modified_base 8: mod_base = OTHER; note = adenosine
  modified_base 9: mod_base = OTHER; note = adenosine
  modified_base 10: mod_base = OTHER; note = guanosine
  modified_base 11: mod_base = um
  modified_base 12: mod_base = um
  modified_base 13: mod_base = OTHER; note = adenosine
  modified_base 14: mod_base = um
  modified_base 15: mod_base = OTHER; note = guanosine
  modified_base 16: mod_base = OTHER; note = guanosine
  modified_base 17: mod_base = OTHER; note = adenosine
  modified_base 18: mod_base = OTHER; note = adenosine
  modified_base 19: mod_base = um
  modified_base 20: mod_base = OTHER; note = 2'-deoxythymidine
  modified_base 21: mod_base = OTHER; note = 2'-deoxythymidine
  source 1..21: mol_type = other RNA
tagcaagaagttatggaattt

SEQ ID NO: 1270 - RNA, 21 nt, synthetic construct
  modified_base 20..21: mod_base = OTHER; note = thymine
  modified_base 1: mod_base = OTHER; note = adenosine
  modified_base 2: mod_base = OTHER; note = guanosine
  modified_base 3: mod_base = cm
  modified_base 4: mod_base = OTHER; note = adenosine
  modified_base 5: mod_base = OTHER; note = adenosine
  modified_base 6: mod_base = OTHER; note = guanosine
  modified_base 7: mod_base = OTHER; note = adenosine
  modified_base 8: mod_base = OTHER; note = adenosine
  modified_base 9: mod_base = OTHER; note = guanosine
  modified_base 10: mod_base = um
  modified_base 11: mod_base = um
  modified_base 12: mod_base = OTHER; note = adenosine
  modified_base 13: mod_base = um
  modified_base 14: mod_base = OTHER; note = guanosine
  modified_base 15: mod_base = OTHER; note = guanosine
  modified_base 16: mod_base = OTHER; note = adenosine
  modified_base 17: mod_base = OTHER; note = adenosine
  modified_base 18: mod_base = um
  modified_base 19: mod_base = um
  modified_base 20: mod_base = OTHER; note = 2'-deoxythymidine
  modified_base 21: mod_base = OTHER; note = 2'-deoxythymidine
  source 1..21: mol_type = other RNA
agcaagaagttatggaatttt

SEQ ID NO: 1271 - RNA, 21 nt, synthetic construct
  modified_base 20..21: mod_base = OTHER; note = thymine
  modified_base 1: mod_base = OTHER; note = guanosine
  modified_base 2: mod_base = cm
  modified_base 3: mod_base = OTHER; note = adenosine
  modified_base 4: mod_base = OTHER; note = adenosine
  modified_base 5: mod_base = OTHER; note = guanosine
  modified_base 6: mod_base = OTHER; note = adenosine
  modified_base 7: mod_base = OTHER; note = adenosine
  modified_base 8: mod_base = OTHER; note = guanosine
  modified_base 9: mod_base = um
  modified_base 10: mod_base = um
  modified_base 11: mod_base = OTHER; note = adenosine
  modified_base 12: mod_base = um
  modified_base 13: mod_base = OTHER; note = guanosine
  modified_base 14: mod_base = OTHER; note = guanosine
  modified_base 15: mod_base = OTHER; note = adenosine
  modified_base 16: mod_base = OTHER; note = adenosine
  modified_base 17: mod_base = um
  modified_base 18: mod_base = um
  modified_base 19: mod_base = cm
  modified_base 20: mod_base = OTHER; note = 2'-deoxythymidine
  modified_base 21: mod_base = OTHER; note = 2'-deoxythymidine
  source 1..21: mol_type = other RNA
gcaagaagttatggaattctt

SEQ ID NO: 1272 - RNA, 21 nt, synthetic construct
  modified_base 20..21: mod_base = OTHER; note = thymine
  modified_base 1: mod_base = cm
  modified_base 2: mod_base = OTHER; note = adenosine
  modified_base 3: mod_base = OTHER; note = adenosine
  modified_base 4: mod_base = OTHER; note = guanosine
  modified_base 5: mod_base = OTHER; note = adenosine
  modified_base 6: mod_base = OTHER; note = adenosine
  modified_base 7: mod_base = OTHER; note = guanosine
  modified_base 8: mod_base = um
  modified_base 9: mod_base = um
  modified_base 10: mod_base = OTHER; note = adenosine
  modified_base 11: mod_base = um
  modified_base 12: mod_base = OTHER; note = guanosine
  modified_base 13: mod_base = OTHER; note = guanosine
  modified_base 14: mod_base = OTHER; note = adenosine
  modified_base 15: mod_base = OTHER; note = adenosine
  modified_base 16: mod_base = um
  modified_base 17: mod_base = um
  modified_base 18: mod_base = cm
  modified_base 19: mod_base = cm
  modified_base 20: mod_base = OTHER; note = 2'-deoxythymidine
  modified_base 21: mod_base = OTHER; note = 2'-deoxythymidine
  source 1..21: mol_type = other RNA
caagaagttatggaattcctt

SEQ ID NO: 1273 - RNA, 21 nt, synthetic construct
  modified_base 20..21: mod_base = OTHER; note = thymine
  modified_base 1: mod_base = OTHER; note = adenosine
  modified_base 2: mod_base = OTHER; note = adenosine
  modified_base 3: mod_base = OTHER; note = guanosine
  modified_base 4: mod_base = OTHER; note = adenosine
  modified_base 5: mod_base = OTHER; note = adenosine
  modified_base 6: mod_base = OTHER; note = guanosine
  modified_base 7: mod_base = um
  modified_base 8: mod_base = um
  modified_base 9: mod_base = OTHER; note = adenosine
  modified_base 10: mod_base = um
  modified_base 11: mod_base = OTHER; note = guanosine
  modified_base 12: mod_base = OTHER; note = guanosine
  modified_base 13: mod_base = OTHER; note = adenosine
  modified_base 14: mod_base = OTHER; note = adenosine
  modified_base 15: mod_base = um
  modified_base 16: mod_base = um
  modified_base 17: mod_base = cm
  modified_base 18: mod_base = cm
  modified_base 19: mod_base = um
  modified_base 20: mod_base = OTHER; note = 2'-deoxythymidine
  modified_base 21: mod_base = OTHER; note = 2'-deoxythymidine
  source 1..21: mol_type = other RNA
aagaagttatggaattccttt

SEQ ID NO: 1274 - RNA, 21 nt, synthetic construct
  modified_base 20..21: mod_base = OTHER; note = thymine
  modified_base 1: mod_base = OTHER; note = adenosine
  modified_base 2: mod_base = OTHER; note = guanosine
  modified_base 3: mod_base = OTHER; note = adenosine
  modified_base 4: mod_base = OTHER; note = adenosine
  modified_base 5: mod_base = OTHER; note = guanosine
  modified_base 6: mod_base = um
  modified_base 7: mod_base = um
  modified_base 8: mod_base = OTHER; note = adenosine
  modified_base 9: mod_base = um
  modified_base 10: mod_base = OTHER; note = guanosine
  modified_base 11: mod_base = OTHER; note = guanosine
  modified_base 12: mod_base = OTHER; note = adenosine
  modified_base 13: mod_base = OTHER; note = adenosine
  modified_base 14: mod_base = um
  modified_base 15: mod_base = um
  modified_base 16: mod_base = cm
  modified_base 17: mod_base = cm
  modified_base 18: mod_base = um
  modified_base 19: mod_base = um
  modified_base 20: mod_base = OTHER; note = 2'-deoxythymidine
  modified_base 21: mod_base = OTHER; note = 2'-deoxythymidine
  source 1..21: mol_type = other RNA
agaagttatggaattcctttt

SEQ ID NO: 1275 - RNA, 21 nt, synthetic construct
  modified_base 20..21: mod_base = OTHER; note = thymine
  modified_base 1: mod_base = OTHER; note = guanosine
  modified_base 2: mod_base = OTHER; note = adenosine
  modified_base 3: mod_base = OTHER; note = adenosine
  modified_base 4: mod_base = OTHER; note = guanosine
  modified_base 5: mod_base = um
  modified_base 6: mod_base = um
  modified_base 7: mod_base = OTHER; note = adenosine
  modified_base 8: mod_base = um
  modified_base 9: mod_base = OTHER; note = guanosine
  modified_base 10: mod_base = OTHER; note = guanosine
  modified_base 11: mod_base = OTHER; note = adenosine
  modified_base 12: mod_base = OTHER; note = adenosine
  modified_base 13: mod_base = um
  modified_base 14: mod_base = um
  modified_base 15: mod_base = cm
  modified_base 16: mod_base = cm
  modified_base 17: mod_base = um
  modified_base 18: mod_base = um
  modified_base 19: mod_base = um
  modified_base 20: mod_base = OTHER; note = 2'-deoxythymidine
  modified_base 21: mod_base = OTHER; note = 2'-deoxythymidine
  source 1..21: mol_type = other RNA
gaagttatggaattccttttt

SEQ ID NO: 1276 - RNA, 21 nt, synthetic construct
  modified_base 20..21: mod_base = OTHER; note = thymine
  modified_base 1: mod_base = OTHER; note = adenosine
  modified_base 2: mod_base = OTHER; note = adenosine
  modified_base 3: mod_base = OTHER; note = guanosine
  modified_base 4: mod_base = um
  modified_base 5: mod_base = um
  modified_base 6: mod_base = OTHER; note = adenosine
  modified_base 7: mod_base = um
  modified_base 8: mod_base = OTHER; note = guanosine
  modified_base 9: mod_base = OTHER; note = guanosine
  modified_base 10: mod_base = OTHER; note = adenosine
  modified_base 11: mod_base = OTHER; note = adenosine
  modified_base 12: mod_base = um
  modified_base 13: mod_base = um
  modified_base 14: mod_base = cm
  modified_base 15: mod_base = cm
  modified_base 16: mod_base = um
  modified_base 17: mod_base = um
  modified_base 18: mod_base = um
  modified_base 19: mod_base = um
  modified_base 20: mod_base = OTHER; note = 2'-deoxythymidine
  modified_base 21: mod_base = OTHER; note = 2'-deoxythymidine
  source 1..21: mol_type = other RNA
aagttatggaattcctttttt

SEQ ID NO: 1277 - RNA, 21 nt, synthetic construct
  modified_base 20..21: mod_base = OTHER; note = thymine
  modified_base 1: mod_base = OTHER; note = adenosine
  modified_base 2: mod_base = OTHER; note = guanosine
  modified_base 3: mod_base = um
  modified_base 4: mod_base = um
  modified_base 5: mod_base = OTHER; note = adenosine
  modified_base 6: mod_base = um
  modified_base 7: mod_base = OTHER; note = guanosine
  modified_base 8: mod_base = OTHER; note = guanosine
  modified_base 9: mod_base = OTHER; note = adenosine
  modified_base 10: mod_base = OTHER; note = adenosine
  modified_base 11: mod_base = um
  modified_base 12: mod_base = um
  modified_base 13: mod_base = cm
  modified_base 14: mod_base = cm
  modified_base 15: mod_base = um
  modified_base 16: mod_base = um
  modified_base 17: mod_base = um
  modified_base 18: mod_base = um
  modified_base 19: mod_base = OTHER; note = adenosine
  modified_base 20: mod_base = OTHER; note = 2'-deoxythymidine
  modified_base 21: mod_base = OTHER; note = 2'-deoxythymidine
  source 1..21: mol_type = other RNA
agttatggaattccttttatt

SEQ ID NO: 1278 - RNA, 21 nt, synthetic construct
  modified_base 20..21: mod_base = OTHER; note = thymine
  modified_base 1: mod_base = OTHER; note = guanosine
  modified_base 2: mod_base = um
  modified_base 3: mod_base = um
  modified_base 4: mod_base = OTHER; note = adenosine
  modified_base 5: mod_base = um
  modified_base 6: mod_base = OTHER; note = guanosine
  modified_base 7: mod_base = OTHER; note = guanosine
  modified_base 8: mod_base = OTHER; note = adenosine
  modified_base 9: mod_base = OTHER; note = adenosine
  modified_base 10: mod_base = um
  modified_base 11: mod_base = um
  modified_base 12: mod_base = cm
  modified_base 13: mod_base = cm
  modified_base 14: mod_base = um
  modified_base 15: mod_base = um
  modified_base 16: mod_base = um
  modified_base 17: mod_base = um
  modified_base 18: mod_base = OTHER; note = adenosine
  modified_base 19: mod_base = um
  modified_base 20: mod_base = OTHER; note = 2'-deoxythymidine
  modified_base 21: mod_base = OTHER; note = 2'-deoxythymidine
  source 1..21: mol_type = other RNA
gttatggaattccttttattt

SEQ ID NO: 1279 - RNA, 21 nt, synthetic construct
  modified_base 20..21: mod_base = OTHER; note = thymine
  modified_base 1: mod_base = um
  modified_base 2: mod_base = um
  modified_base 3: mod_base = OTHER; note = adenosine
  modified_base 4: mod_base = um
  modified_base 5: mod_base = OTHER; note = guanosine
  modified_base 6: mod_base = OTHER; note = guanosine
  modified_base 7: mod_base = OTHER; note = adenosine
  modified_base 8: mod_base = OTHER; note = adenosine
  modified_base 9: mod_base = um
  modified_base 10: mod_base = um
  modified_base 11: mod_base = cm
  modified_base 12: mod_base = cm
  modified_base 13: mod_base = um
  modified_base 14: mod_base = um
  modified_base 15: mod_base = um
  modified_base 16: mod_base = um
  modified_base 17: mod_base = OTHER; note = adenosine
  modified_base 18: mod_base = um
  modified_base 19: mod_base = um
  modified_base 20: mod_base = OTHER; note = 2'-deoxythymidine
  modified_base 21: mod_base = OTHER; note = 2'-deoxythymidine
  source 1..21: mol_type = other RNA
ttatggaattccttttatttt

SEQ ID NO: 1280 - RNA, 21 nt, synthetic construct
  modified_base 20..21: mod_base = OTHER; note = thymine
  modified_base 1: mod_base = um
  modified_base 2: mod_base = OTHER; note = adenosine
  modified_base 3: mod_base = um
  modified_base 4: mod_base = OTHER; note = guanosine
  modified_base 5: mod_base = OTHER; note = guanosine
  modified_base 6: mod_base = OTHER; note = adenosine
  modified_base 7: mod_base = OTHER; note = adenosine
  modified_base 8: mod_base = um
  modified_base 9: mod_base = um
  modified_base 10: mod_base = cm
  modified_base 11: mod_base = cm
  modified_base 12: mod_base = um
  modified_base 13: mod_base = um
  modified_base 14: mod_base = um
  modified_base 15: mod_base = um
  modified_base 16: mod_base = OTHER; note = adenosine
  modified_base 17: mod_base = um
  modified_base 18: mod_base = um
  modified_base 19: mod_base = OTHER; note = guanosine
  modified_base 20: mod_base = OTHER; note = 2'-deoxythymidine
  modified_base 21: mod_base = OTHER; note = 2'-deoxythymidine
  source 1..21: mol_type = other RNA
tatggaattccttttattgtt

SEQ ID NO: 1281 - RNA, 21 nt, synthetic construct
  modified_base 20..21: mod_base = OTHER; note = thymine
  modified_base 1: mod_base = OTHER; note = adenosine
  modified_base 2: mod_base = um
  modified_base 3: mod_base = OTHER; note = guanosine
  modified_base 4: mod_base = OTHER; note = guanosine
  modified_base 5: mod_base = OTHER; note = adenosine
  modified_base 6: mod_base = OTHER; note = adenosine
  modified_base 7: mod_base = um
  modified_base 8: mod_base = um
  modified_base 9: mod_base = cm
  modified_base 10: mod_base = cm
  modified_base 11: mod_base = um
  modified_base 12: mod_base = um
  modified_base 13: mod_base = um
  modified_base 14: mod_base = um
  modified_base 15: mod_base = OTHER; note = adenosine
  modified_base 16: mod_base = um
  modified_base 17: mod_base = um
  modified_base 18: mod_base = OTHER; note = guanosine
  modified_base 19: mod_base = OTHER; note = adenosine
  modified_base 20: mod_base = OTHER; note = 2'-deoxythymidine
  modified_base 21: mod_base = OTHER; note = 2'-deoxythymidine
  source 1..21: mol_type = other RNA
atggaattccttttattgatt

SEQ ID NO: 1282 - RNA, 21 nt, synthetic construct
  modified_base 20..21: mod_base = OTHER; note = thymine
  modified_base 1: mod_base = OTHER; note = uridine
  modified_base 2: mod_base = OTHER; note = guanosine
  modified_base 3: mod_base = OTHER; note = uridine
  modified_base 4: mod_base = OTHER; note = uridine
  modified_base 5: mod_base = OTHER; note = guanosine
  modified_base 6: mod_base = OTHER; note = guanosine
  modified_base 7: mod_base = OTHER; note = adenosine
  modified_base 8: mod_base = OTHER; note = uridine
  modified_base 9: mod_base = cm
  modified_base 10: mod_base = OTHER; note = adenosine
  modified_base 11: mod_base = um
  modified_base 12: mod_base = OTHER; note = adenosine
  modified_base 13: mod_base = OTHER; note = uridine
  modified_base 14: mod_base = OTHER; note = uridine
  modified_base 15: mod_base = OTHER; note = cytidine
  modified_base 16: mod_base = OTHER; note = guanosine
  modified_base 17: mod_base = OTHER; note = uridine
  modified_base 18: mod_base = OTHER; note = cytidine
  modified_base 19: mod_base = OTHER; note = cytidine
  modified_base 20: mod_base = OTHER; note = 2'-deoxythymidine
  modified_base 21: mod_base = OTHER; note = 2'-deoxythymidine
  source 1..21: mol_type = other RNA
tgttggatcatattcgtcctt

SEQ ID NO: 1283 - RNA, 21 nt, synthetic construct
  modified_base 20..21: mod_base = OTHER; note = thymine
  modified_base 1: mod_base = OTHER; note = uridine
  modified_base 2: mod_base = OTHER; note = uridine
  modified_base 3: mod_base = OTHER; note = guanosine
  modified_base 4: mod_base = OTHER; note = uridine
  modified_base 5: mod_base = OTHER; note = uridine
  modified_base 6: mod_base = OTHER; note = guanosine
  modified_base 7: mod_base = OTHER; note = guanosine
  modified_base 8: mod_base = OTHER; note = adenosine
  modified_base 9: mod_base = OTHER; note = uridine
  modified_base 10: mod_base = cm
  modified_base 11: mod_base = OTHER; note = adenosine
  modified_base 12: mod_base = um
  modified_base 13: mod_base = OTHER; note = adenosine
  modified_base 14: mod_base = OTHER; note = uridine
  modified_base 15: mod_base = OTHER; note = uridine
  modified_base 16: mod_base = OTHER; note = cytidine
  modified_base 17: mod_base = OTHER; note = guanosine
  modified_base 18: mod_base = OTHER; note = uridine
  modified_base 19: mod_base = OTHER; note = cytidine
  modified_base 20: mod_base = OTHER; note = 2'-deoxythymidine
  modified_base 21: mod_base = OTHER; note = 2'-deoxythymidine
  source 1..21: mol_type = other RNA
ttgttggatcatattcgtctt

SEQ ID NO: 1284 - RNA, 21 nt, synthetic construct
  modified_base 20..21: mod_base = OTHER; note = thymine
  modified_base 1: mod_base = OTHER; note = adenosine
  modified_base 2: mod_base = OTHER; note = uridine
  modified_base 3: mod_base = OTHER; note = uridine
  modified_base 4: mod_base = OTHER; note = guanosine
  modified_base 5: mod_base = OTHER; note = uridine
  modified_base 6: mod_base = OTHER; note = uridine
  modified_base 7: mod_base = OTHER; note = guanosine
  modified_base 8: mod_base = OTHER; note = guanosine
  modified_base 9: mod_base = OTHER; note = adenosine
  modified_base 10: mod_base = OTHER; note = uridine
  modified_base 11: mod_base = cm
  modified_base 12: mod_base = OTHER; note = adenosine
  modified_base 13: mod_base = um
  modified_base 14: mod_base = OTHER; note = adenosine
  modified_base 15: mod_base = OTHER; note = uridine
  modified_base 16: mod_base = OTHER; note = uridine
  modified_base 17: mod_base = OTHER; note = cytidine
  modified_base 18: mod_base = OTHER; note = guanosine
  modified_base 19: mod_base = OTHER; note = uridine
  modified_base 20: mod_base = OTHER; note = 2'-deoxythymidine
  modified_base 21: mod_base = OTHER; note = 2'-deoxythymidine
  source 1..21: mol_type = other RNA
attgttggatcatattcgttt

SEQ ID NO: 1285 - RNA, 21 nt, synthetic construct
  modified_base 20..21: mod_base = OTHER; note = thymine
  modified_base 1: mod_base = um
  modified_base 2: mod_base = OTHER; note = adenosine
  modified_base 3: mod_base = OTHER; note = uridine
  modified_base 4: mod_base = OTHER; note = uridine
  modified_base 5: mod_base = OTHER; note = guanosine
  modified_base 6: mod_base = OTHER; note = uridine
  modified_base 7: mod_base = OTHER; note = uridine
  modified_base 8: mod_base = OTHER; note = guanosine
  modified_base 9: mod_base = OTHER; note = guanosine
  modified_base 10: mod_base = OTHER; note = adenosine
  modified_base 11: mod_base = OTHER; note = uridine
  modified_base 12: mod_base = cm
  modified_base 13: mod_base = OTHER; note = adenosine
  modified_base 14: mod_base = um
  modified_base 15: mod_base = OTHER; note = adenosine
  modified_base 16: mod_base = OTHER; note = uridine
  modified_base 17: mod_base = OTHER; note = uridine
  modified_base 18: mod_base = OTHER; note = cytidine
  modified_base 19: mod_base = OTHER; note = guanosine
  modified_base 20: mod_base = OTHER; note = 2'-deoxythymidine
  modified_base 21: mod_base = OTHER; note = 2'-deoxythymidine
  source 1..21: mol_type = other RNA
tattgttggatcatattcgtt

SEQ ID NO: 1286 - RNA, 21 nt, synthetic construct
  modified_base 20..21: mod_base = OTHER; note = thymine
  modified_base 1: mod_base = OTHER; note = cytidine
  modified_base 2: mod_base = um
  modified_base 3: mod_base = OTHER; note = adenosine
  modified_base 4: mod_base = OTHER; note = uridine
  modified_base 5: mod_base = OTHER; note = uridine
  modified_base 6: mod_base = OTHER; note = guanosine
  modified_base 7: mod_base = OTHER; note = uridine
  modified_base 8: mod_base = OTHER; note = uridine
  modified_base 9: mod_base = OTHER; note = guanosine
  modified_base 10: mod_base = OTHER; note = guanosine
  modified_base 11: mod_base = OTHER; note = adenosine
  modified_base 12: mod_base = OTHER; note = uridine
  modified_base 13: mod_base = cm
  modified_base 14: mod_base = OTHER; note = adenosine
  modified_base 15: mod_base = um
  modified_base 16: mod_base = OTHER; note = adenosine
  modified_base 17: mod_base = OTHER; note = uridine
  modified_base 18: mod_base = OTHER; note = uridine
  modified_base 19: mod_base = OTHER; note = cytidine
  modified_base 20: mod_base = OTHER; note = 2'-deoxythymidine
  modified_base 21: mod_base = OTHER; note = 2'-deoxythymidine
  source 1..21: mol_type = other RNA
ctattgttggatcatattctt

SEQ ID NO: 1287 - RNA, 21 nt, synthetic construct
  modified_base 20..21: mod_base = OTHER; note = thymine
  modified_base 1: mod_base = OTHER; note = uridine
  modified_base 2: mod_base = OTHER; note = cytidine
  modified_base 3: mod_base = um
  modified_base 4: mod_base = OTHER; note = adenosine
  modified_base 5: mod_base = OTHER; note = uridine
  modified_base 6: mod_base = OTHER; note = uridine
  modified_base 7: mod_base = OTHER; note = guanosine
  modified_base 8: mod_base = OTHER; note = uridine
  modified_base 9: mod_base = OTHER; note = uridine
  modified_base 10: mod_base = OTHER; note = guanosine
  modified_base 11: mod_base = OTHER; note = guanosine
  modified_base 12: mod_base = OTHER; note = adenosine
  modified_base 13: mod_base = OTHER; note = uridine
  modified_base 14: mod_base = cm
  modified_base 15: mod_base = OTHER; note = adenosine
  modified_base 16: mod_base = um
  modified_base 17: mod_base = OTHER; note = adenosine
  modified_base 18: mod_base = OTHER; note = uridine
  modified_base 19: mod_base = OTHER; note = uridine
  modified_base 20: mod_base = OTHER; note = 2'-deoxythymidine
  modified_base 21: mod_base = OTHER; note = 2'-deoxythymidine
  source 1..21: mol_type = other RNA
tctattgttggatcatatttt

SEQ ID NO: 1288 - RNA, 21 nt, synthetic construct
  modified_base 20..21: mod_base = OTHER; note = thymine
  modified_base 1: mod_base = OTHER; note = cytidine
  modified_base 2: mod_base = OTHER; note = uridine
  modified_base 3: mod_base = OTHER; note = cytidine
  modified_base 4: mod_base = um
  modified_base 5: mod_base = OTHER; note = adenosine
  modified_base 6: mod_base = OTHER; note = uridine
  modified_base 7: mod_base = OTHER; note = uridine
  modified_base 8: mod_base = OTHER; note = guanosine
  modified_base 9: mod_base = OTHER; note = uridine
  modified_base 10: mod_base = OTHER; note = uridine
  modified_base 11: mod_base = OTHER; note = guanosine
  modified_base 12: mod_base = OTHER; note = guanosine
  modified_base 13: mod_base = OTHER; note = adenosine
  modified_base 14: mod_base = OTHER; note = uridine
  modified_base 15: mod_base = cm
  modified_base 16: mod_base = OTHER; note = adenosine
  modified_base 17: mod_base = um
  modified_base 18: mod_base = OTHER; note = adenosine
  modified_base 19: mod_base = OTHER; note = uridine
  modified_base 20: mod_base = OTHER; note = 2'-deoxythymidine
  modified_base 21: mod_base = OTHER; note = 2'-deoxythymidine
  source 1..21: mol_type = other RNA
ctctattgttggatcatattt

SEQ ID NO: 1289 - RNA, 21 nt, synthetic construct
  modified_base 20..21: mod_base = OTHER; note = thymine
  modified_base 1: mod_base = OTHER; note = cytidine
  modified_base 2: mod_base = OTHER; note = cytidine
  modified_base 3: mod_base = OTHER; note = uridine
  modified_base 4: mod_base = OTHER; note = cytidine
  modified_base 5: mod_base = um
  modified_base 6: mod_base = OTHER; note = adenosine
  modified_base 7: mod_base = OTHER; note = uridine
  modified_base 8: mod_base = OTHER; note = uridine
  modified_base 9: mod_base = OTHER; note = guanosine
  modified_base 10: mod_base = OTHER; note = uridine
  modified_base 11: mod_base = OTHER; note = uridine
  modified_base 12: mod_base = OTHER; note = guanosine
  modified_base 13: mod_base = OTHER; note = guanosine
  modified_base 14: mod_base = OTHER; note = adenosine
  modified_base 15: mod_base = OTHER; note = uridine
  modified_base 16: mod_base = cm
  modified_base 17: mod_base = OTHER; note = adenosine
  modified_base 18: mod_base = um
  modified_base 19: mod_base = OTHER; note = adenosine
  modified_base 20: mod_base = OTHER; note = 2'-deoxythymidine
  modified_base 21: mod_base = OTHER; note = 2'-deoxythymidine
  source 1..21: mol_type = other RNA
cctctattgttggatcatatt

SEQ ID NO: 1290 - RNA, 21 nt, synthetic construct
  modified_base 20..21: mod_base = OTHER; note = thymine
  modified_base 1: mod_base = OTHER; note = uridine
  modified_base 2: mod_base = OTHER; note = cytidine
  modified_base 3: mod_base = OTHER; note = cytidine
  modified_base 4: mod_base = OTHER; note = uridine
  modified_base 5: mod_base = OTHER; note = cytidine
  modified_base 6: mod_base = um
  modified_base 7: mod_base = OTHER; note = adenosine
  modified_base 8: mod_base = OTHER; note = uridine
  modified_base 9: mod_base = OTHER; note = uridine
  modified_base 10: mod_base = OTHER; note = guanosine
  modified_base 11: mod_base = OTHER; note = uridine
  modified_base 12: mod_base = OTHER; note = uridine
  modified_base 13: mod_base = OTHER; note = guanosine
  modified_base 14: mod_base = OTHER; note = guanosine
  modified_base 15: mod_base = OTHER; note = adenosine
  modified_base 16: mod_base = OTHER; note = uridine
  modified_base 17: mod_base = cm
  modified_base 18: mod_base = OTHER; note = adenosine
  modified_base 19: mod_base = OTHER; note = uridine
  modified_base 20: mod_base = OTHER; note = 2'-deoxythymidine
  modified_base 21: mod_base = OTHER; note = 2'-deoxythymidine
  source 1..21: mol_type = other RNA
tcctctattgttggatcattt

SEQ ID NO: 1291 - RNA, 21 nt, synthetic construct
  modified_base 20..21: mod_base = OTHER; note = thymine
  modified_base 1: mod_base = OTHER; note = adenosine
  modified_base 2: mod_base = OTHER; note = uridine
  modified_base 3: mod_base = OTHER; note = cytidine
  modified_base 4: mod_base = OTHER; note = cytidine
  modified_base 5: mod_base = OTHER; note = uridine
  modified_base 6: mod_base = OTHER; note = cytidine
  modified_base 7: mod_base = um
  modified_base 8: mod_base = OTHER; note = adenosine
  modified_base 9: mod_base = OTHER; note = uridine
  modified_base 10: mod_base = OTHER; note = uridine
  modified_base 11: mod_base = OTHER; note = guanosine
  modified_base 12: mod_base = OTHER; note = uridine
  modified_base 13: mod_base = OTHER; note = uridine
  modified_base 14: mod_base = OTHER; note = guanosine
  modified_base 15: mod_base = OTHER; note = guanosine
  modified_base 16: mod_base = OTHER; note = adenosine
  modified_base 17: mod_base = OTHER; note = uridine
  modified_base 18: mod_base = cm
  modified_base 19: mod_base = OTHER; note = adenosine
  modified_base 20: mod_base = OTHER; note = 2'-deoxythymidine
  modified_base 21: mod_base = OTHER; note = 2'-deoxythymidine
  source 1..21: mol_type = other RNA
atcctctattgttggatcatt

SEQ ID NO: 1292 - RNA, 21 nt, synthetic construct
  modified_base 20..21: mod_base = OTHER; note = thymine
  modified_base 1: mod_base = OTHER; note = adenosine
  modified_base 2: mod_base = OTHER; note = adenosine
  modified_base 3: mod_base = OTHER; note = uridine
  modified_base 4: mod_base = OTHER; note = cytidine
  modified_base 5: mod_base = OTHER; note = cytidine
  modified_base 6: mod_base = OTHER; note = uridine
  modified_base 7: mod_base = OTHER; note = cytidine
  modified_base 8: mod_base = um
  modified_base 9: mod_base = OTHER; note = adenosine
  modified_base 10: mod_base = OTHER; note = uridine
  modified_base 11: mod_base = OTHER; note = uridine
  modified_base 12: mod_base = OTHER; note = guanosine
  modified_base 13: mod_base = OTHER; note = uridine
  modified_base 14: mod_base = OTHER; note = uridine
  modified_base 15: mod_base = OTHER; note = guanosine
  modified_base 16: mod_base = OTHER; note = guanosine
  modified_base 17: mod_base = OTHER; note = adenosine
  modified_base 18: mod_base = OTHER; note = uridine
  modified_base 19: mod_base = OTHER; note = cytidine
  modified_base 20: mod_base = OTHER; note = 2'-deoxythymidine
  modified_base 21: mod_base = OTHER; note = 2'-deoxythymidine
  source 1..21: mol_type = other RNA
aatcctctattgttggatctt

SEQ ID NO: 1293 - RNA, 21 nt, synthetic construct
  modified_base 20..21: mod_base = OTHER; note = thymine
  modified_base 1: mod_base = OTHER; note = guanosine
  modified_base 2: mod_base = OTHER; note = adenosine
  modified_base 3: mod_base = OTHER; note = adenosine
  modified_base 4: mod_base = OTHER; note = uridine
  modified_base 5: mod_base = OTHER; note = cytidine
  modified_base 6: mod_base = OTHER; note = cytidine
  modified_base 7: mod_base = OTHER; note = uridine
  modified_base 8: mod_base = OTHER; note = cytidine
  modified_base 9: mod_base = um
  modified_base 10: mod_base = OTHER; note = adenosine
  modified_base 11: mod_base = OTHER; note = uridine
  modified_base 12: mod_base = OTHER; note = uridine
  modified_base 13: mod_base = OTHER; note = guanosine
  modified_base 14: mod_base = OTHER; note = uridine
  modified_base 15: mod_base = OTHER; note = uridine
  modified_base 16: mod_base = OTHER; note = guanosine
  modified_base 17: mod_base = OTHER; note = guanosine
  modified_base 18: mod_base = OTHER; note = adenosine
  modified_base 19: mod_base = OTHER; note = uridine
  modified_base 20: mod_base = OTHER; note = 2'-deoxythymidine
  modified_base 21: mod_base = OTHER; note = 2'-deoxythymidine
  source 1..21: mol_type = other RNA
gaatcctctattgttggattt

SEQ ID NO: 1294 - RNA, 21 nt, synthetic construct
  modified_base 20..21: mod_base = OTHER; note = thymine
  modified_base 1: mod_base = OTHER; note = guanosine
  modified_base 2: mod_base = OTHER; note = guanosine
  modified_base 3: mod_base = OTHER; note = adenosine
  modified_base 4: mod_base = OTHER; note = adenosine
  modified_base 5: mod_base = OTHER; note = uridine
  modified_base 6: mod_base = OTHER; note = cytidine
  modified_base 7: mod_base = OTHER; note = cytidine
  modified_base 8: mod_base = OTHER; note = uridine
  modified_base 9: mod_base = OTHER; note = cytidine
  modified_base 10: mod_base = um
  modified_base 11: mod_base = OTHER; note = adenosine
  modified_base 12: mod_base = OTHER; note = uridine
  modified_base 13: mod_base = OTHER; note = uridine
  modified_base 14: mod_base = OTHER; note = guanosine
  modified_base 15: mod_base = OTHER; note = uridine
  modified_base 16: mod_base = OTHER; note = uridine
  modified_base 17: mod_base = OTHER; note = guanosine
  modified_base 18: mod_base = OTHER; note = guanosine
  modified_base 19: mod_base = OTHER; note = adenosine
  modified_base 20: mod_base = OTHER; note = 2'-deoxythymidine
  modified_base 21: mod_base = OTHER; note = 2'-deoxythymidine
  source 1..21: mol_type = other RNA
ggaatcctctattgttggatt

SEQ ID NO: 1295 - RNA, 21 nt, synthetic construct
  modified_base 20..21: mod_base = OTHER; note = thymine
  modified_base 1: mod_base = OTHER; note = adenosine
  modified_base 2: mod_base = OTHER; note = guanosine
  modified_base 3: mod_base = OTHER; note = guanosine
  modified_base 4: mod_base = OTHER; note = adenosine
  modified_base 5: mod_base = OTHER; note = adenosine
  modified_base 6: mod_base = OTHER; note = uridine
  modified_base 7: mod_base = OTHER; note = cytidine
  modified_base 8: mod_base = OTHER; note = cytidine
  modified_base 9: mod_base = OTHER; note = uridine
  modified_base 10: mod_base = OTHER; note = cytidine
  modified_base 11: mod_base = um
  modified_base 12: mod_base = OTHER; note = adenosine
  modified_base 13: mod_base = OTHER; note = uridine
  modified_base 14: mod_base = OTHER; note = uridine
  modified_base 15: mod_base = OTHER; note = guanosine
  modified_base 16: mod_base = OTHER; note = uridine
  modified_base 17: mod_base = OTHER; note = uridine
  modified_base 18: mod_base = OTHER; note = guanosine
  modified_base 19: mod_base = OTHER; note = guanosine
  modified_base 20: mod_base = OTHER; note = 2'-deoxythymidine
  modified_base 21: mod_base = OTHER; note = 2'-deoxythymidine
  source 1..21: mol_type = other RNA
aggaatcctctattgttggtt

SEQ ID NO: 1296 - RNA, 21 nt, synthetic construct
  modified_base 20..21: mod_base = OTHER; note = thymine
  modified_base 1: mod_base = um
  modified_base 2: mod_base = OTHER; note = adenosine
  modified_base 3: mod_base = OTHER; note = guanosine
  modified_base 4: mod_base = OTHER; note = guanosine
  modified_base 5: mod_base = OTHER; note = adenosine
  modified_base 6: mod_base = OTHER; note = adenosine
  modified_base 7: mod_base = OTHER; note = uridine
  modified_base 8: mod_base = OTHER; note = cytidine
  modified_base 9: mod_base = OTHER; note = cytidine
  modified_base 10: mod_base = OTHER; note = uridine
  modified_base 11: mod_base = OTHER; note = cytidine
  modified_base 12: mod_base = um
  modified_base 13: mod_base = OTHER; note = adenosine
  modified_base 14: mod_base = OTHER; note = uridine
  modified_base 15: mod_base = OTHER; note = uridine
  modified_base 16: mod_base = OTHER; note = guanosine
  modified_base 17: mod_base = OTHER; note = uridine
  modified_base 18: mod_base = OTHER; note = uridine
  modified_base 19: mod_base = OTHER; note = guanosine
  modified_base 20: mod_base = OTHER; note = 2'-deoxythymidine
  modified_base 21: mod_base = OTHER; note = 2'-deoxythymidine
  source 1..21: mol_type = other RNA
taggaatcctctattgttgtt

SEQ ID NO: 1297 - RNA, 21 nt, synthetic construct
  modified_base 20..21: mod_base = OTHER; note = thymine
  modified_base 1: mod_base = OTHER; note = guanosine
  modified_base 2: mod_base = um
  modified_base 3: mod_base = OTHER; note = adenosine
  modified_base 4: mod_base = OTHER; note = guanosine
  modified_base 5: mod_base = OTHER; note = guanosine
  modified_base 6: mod_base = OTHER; note = adenosine
  modified_base 7: mod_base = OTHER; note = adenosine
  modified_base 8: mod_base = OTHER; note = uridine
  modified_base 9: mod_base = OTHER; note = cytidine
  modified_base 10: mod_base = OTHER; note = cytidine
  modified_base 11: mod_base = OTHER; note = uridine
  modified_base 12: mod_base = OTHER; note = cytidine
  modified_base 13: mod_base = um
  modified_base 14: mod_base = OTHER; note = adenosine
  modified_base 15: mod_base = OTHER; note = uridine
  modified_base 16: mod_base = OTHER; note = uridine
  modified_base 17: mod_base = OTHER; note = guanosine
  modified_base 18: mod_base = OTHER; note = uridine
  modified_base 19: mod_base = OTHER; note = uridine
  modified_base 20: mod_base = OTHER; note = 2'-deoxythymidine
  modified_base 21: mod_base = OTHER; note = 2'-deoxythymidine
  source 1..21: mol_type = other RNA
gtaggaatcctctattgtttt

SEQ ID NO: 1298 - RNA, 21 nt, synthetic construct
  modified_base 20..21: mod_base = OTHER; note = thymine
  modified_base 1: mod_base = OTHER; note = uridine
  modified_base 2: mod_base = OTHER; note = guanosine
  modified_base 3: mod_base = um
  modified_base 4: mod_base = OTHER; note = adenosine
  modified_base 5: mod_base = OTHER; note = guanosine
  modified_base 6: mod_base = OTHER; note = guanosine
  modified_base 7: mod_base = OTHER; note = adenosine
  modified_base 8: mod_base = OTHER; note = adenosine
  modified_base 9: mod_base = OTHER; note = uridine
  modified_base 10: mod_base = OTHER; note = cytidine
  modified_base 11: mod_base = OTHER; note = cytidine
  modified_base 12: mod_base = OTHER; note = uridine
  modified_base 13: mod_base = OTHER; note = cytidine
  modified_base 14: mod_base = um
  modified_base 15: mod_base = OTHER; note = adenosine
  modified_base 16: mod_base = OTHER; note = uridine
  modified_base 17: mod_base = OTHER; note = uridine
  modified_base 18: mod_base = OTHER; note = guanosine
  modified_base 19: mod_base = OTHER; note = uridine
  modified_base 20: mod_base = OTHER; note = 2'-deoxythymidine
  modified_base 21: mod_base = OTHER; note = 2'-deoxythymidine
  source 1..21: mol_type = other RNA
tgtaggaatcctctattgttt

SEQ ID NO: 1299 - RNA, 21 nt, synthetic construct
  modified_base 20..21: mod_base = OTHER; note = thymine
  modified_base 1: mod_base = OTHER; note = cytidine
  modified_base 2: mod_base = OTHER; note = uridine
  modified_base 3: mod_base = OTHER; note = guanosine
  modified_base 4: mod_base = um
  modified_base 5: mod_base = OTHER; note = adenosine
  modified_base 6: mod_base = OTHER; note = guanosine
  modified_base 7: mod_base = OTHER; note = guanosine
  modified_base 8: mod_base = OTHER; note = adenosine
  modified_base 9: mod_base = OTHER; note = adenosine
  modified_base 10: mod_base = OTHER; note = uridine
  modified_base 11: mod_base = OTHER; note = cytidine
  modified_base 12: mod_base = OTHER; note = cytidine
  modified_base 13: mod_base = OTHER; note = uridine
  modified_base 14: mod_base = OTHER; note = cytidine
  modified_base 15: mod_base = um
  modified_base 16: mod_base = OTHER; note = adenosine
  modified_base 17: mod_base = OTHER; note = uridine
  modified_base 18: mod_base = OTHER; note = uridine
  modified_base 19: mod_base = OTHER; note = guanosine
  modified_base 20: mod_base = OTHER; note = 2'-deoxythymidine
  modified_base 21: mod_base = OTHER; note = 2'-deoxythymidine
  source 1..21: mol_type = other RNA
ctgtaggaatcctctattgtt

SEQ ID NO: 1300 - RNA, 21 nt, synthetic construct
  modified_base 20..21: mod_base = OTHER; note = thymine
  modified_base 1: mod_base = OTHER; note = cytidine
  modified_base 2: mod_base = OTHER; note = cytidine
  modified_base 3: mod_base = OTHER; note = uridine
  modified_base 4: mod_base = OTHER; note = guanosine
  modified_base 5: mod_base = um
  modified_base 6: mod_base = OTHER; note = adenosine
  modified_base 7: mod_base = OTHER; note = guanosine
  modified_base 8: mod_base = OTHER; note = guanosine
  modified_base 9: mod_base = OTHER; note = adenosine
  modified_base 10: mod_base = OTHER; note = adenosine
  modified_base 11: mod_base = OTHER; note = uridine
  modified_base 12: mod_base = OTHER; note = cytidine
  modified_base 13: mod_base = OTHER; note = cytidine
  modified_base 14: mod_base = OTHER; note = uridine
  modified_base 15: mod_base = OTHER; note = cytidine
  modified_base 16: mod_base = um
  modified_base 17: mod_base = OTHER; note = adenosine
  modified_base 18: mod_base = OTHER; note = uridine
  modified_base 19: mod_base = OTHER; note = uridine
  modified_base 20: mod_base = OTHER; note = 2'-deoxythymidine
  modified_base 21: mod_base = OTHER; note = 2'-deoxythymidine
  source 1..21: mol_type = other RNA
cctgtaggaatcctctatttt

SEQ ID NO: 1301 - RNA, 21 nt, synthetic construct
  modified_base 20..21: mod_base = OTHER; note = thymine
  modified_base 1: mod_base = OTHER; note = uridine
  modified_base 2: mod_base = OTHER; note = cytidine
  modified_base 3: mod_base = OTHER; note = cytidine
  modified_base 4: mod_base = OTHER; note = uridine
  modified_base 5: mod_base = OTHER; note = guanosine
  modified_base 6: mod_base = um
  modified_base 7: mod_base = OTHER; note = adenosine
  modified_base 8: mod_base = OTHER; note = guanosine
  modified_base 9: mod_base = OTHER; note = guanosine
  modified_base 10: mod_base = OTHER; note = adenosine
  modified_base 11: mod_base = OTHER; note = adenosine
  modified_base 12: mod_base = OTHER; note = uridine
  modified_base 13: mod_base = OTHER; note = cytidine
  modified_base 14: mod_base = OTHER; note = cytidine
  modified_base 15: mod_base = OTHER; note = uridine
  modified_base 16: mod_base = OTHER; note = cytidine
  modified_base 17: mod_base = um
  modified_base 18: mod_base = OTHER; note = adenosine
  modified_base 19: mod_base = OTHER; note = uridine
  modified_base 20: mod_base = OTHER; note = 2'-deoxythymidine
  modified_base 21: mod_base = OTHER; note = 2'-deoxythymidine
  source 1..21: mol_type = other RNA
tcctgtaggaatcctctattt

SEQ ID NO: 1302 - RNA, 21 nt, synthetic construct
  modified_base 20..21: mod_base = OTHER; note = thymine
  modified_base 1: mod_base = OTHER; note = uridine
  modified_base 2: mod_base = OTHER; note = uridine
  modified_base 3: mod_base = OTHER; note = cytidine
  modified_base 4: mod_base = OTHER; note = cytidine
  modified_base 5: mod_base = OTHER; note = uridine
  modified_base 6: mod_base = OTHER; note = guanosine
  modified_base 7: mod_base = um
  modified_base 8: mod_base = OTHER; note = adenosine
  modified_base 9: mod_base = OTHER; note = guanosine
  modified_base 10: mod_base = OTHER; note = guanosine
  modified_base 11: mod_base = OTHER; note = adenosine
  modified_base 12: mod_base = OTHER; note = adenosine
  modified_base 13: mod_base = OTHER; note = uridine
  modified_base 14: mod_base = OTHER; note = cytidine
  modified_base 15: mod_base = OTHER; note = cytidine
  modified_base 16: mod_base = OTHER; note = uridine
  modified_base 17: mod_base = OTHER; note = cytidine
  modified_base 18: mod_base = um
  modified_base 19: mod_base = OTHER; note = adenosine
  modified_base 20: mod_base = OTHER; note = 2'-deoxythymidine
  modified_base 21: mod_base = OTHER; note = 2'-deoxythymidine
  source 1..21: mol_type = other RNA
ttcctgtaggaatcctctatt

SEQ ID NO: 1303 - RNA, 21 nt, synthetic construct
  modified_base 20..21: mod_base = OTHER; note = thymine
  modified_base 1: mod_base = OTHER; note = cytidine
  modified_base 2: mod_base = OTHER; note = uridine
  modified_base 3: mod_base = OTHER; note = uridine
  modified_base 4: mod_base = OTHER; note = cytidine
  modified_base 5: mod_base = OTHER; note = cytidine
  modified_base 6: mod_base = OTHER; note = uridine
  modified_base 7: mod_base = OTHER; note = guanosine
  modified_base 8: mod_base = um
  modified_base 9: mod_base = OTHER; note = adenosine
  modified_base 10: mod_base = OTHER; note = guanosine
  modified_base 11: mod_base = OTHER; note = guanosine
  modified_base 12: mod_base = OTHER; note = adenosine
  modified_base 13: mod_base = OTHER; note = adenosine
  modified_base 14: mod_base = OTHER; note = uridine
  modified_base 15: mod_base = OTHER; note = cytidine
  modified_base 16: mod_base = OTHER; note = cytidine
  modified_base 17: mod_base = OTHER; note = uridine
  modified_base 18: mod_base = OTHER; note = cytidine
  modified_base 19: mod_base = OTHER; note = uridine
  modified_base 20: mod_base = OTHER; note = 2'-deoxythymidine
  modified_base 21: mod_base = OTHER; note = 2'-deoxythymidine
  source 1..21: mol_type = other RNA
cttcctgtaggaatcctcttt

SEQ ID NO: 1304 - RNA, 21 nt, synthetic construct
  modified_base 20..21: mod_base = OTHER; note = thymine
  modified_base 1: mod_base = OTHER; note = guanosine
  modified_base 2: mod_base = OTHER; note = cytidine
  modified_base 3: mod_base = OTHER; note = uridine
  modified_base 4: mod_base = OTHER; note = uridine
  modified_base 5: mod_base = OTHER; note = cytidine
  modified_base 6: mod_base = OTHER; note = cytidine
  modified_base 7: mod_base = OTHER; note = uridine
  modified_base 8: mod_base = OTHER; note = guanosine
  modified_base 9: mod_base = um
  modified_base 10: mod_base = OTHER; note = adenosine
  modified_base 11: mod_base = OTHER; note = guanosine
  modified_base 12: mod_base = OTHER; note = guanosine
  modified_base 13: mod_base = OTHER; note = adenosine
  modified_base 14: mod_base = OTHER; note = adenosine
  modified_base 15: mod_base = OTHER; note = uridine
  modified_base 16: mod_base = OTHER; note = cytidine
  modified_base 17: mod_base = OTHER; note = cytidine
  modified_base 18: mod_base = OTHER; note = uridine
  modified_base 19: mod_base = OTHER; note = cytidine
  modified_base 20: mod_base = OTHER; note = 2'-deoxythymidine
  modified_base 21: mod_base = OTHER; note = 2'-deoxythymidine
  source 1..21: mol_type = other RNA
gcttcctgtaggaatcctctt

SEQ ID NO: 1305 - RNA, 21 nt, synthetic construct
  modified_base 20..21: mod_base = OTHER; note = thymine
  modified_base 1: mod_base = OTHER; note = uridine
  modified_base 2: mod_base = OTHER; note = guanosine
  modified_base 3: mod_base = OTHER; note = cytidine
  modified_base 4: mod_base = OTHER; note = uridine
  modified_base 5: mod_base = OTHER; note = uridine
  modified_base 6: mod_base = OTHER; note = cytidine
  modified_base 7: mod_base = OTHER; note = cytidine
  modified_base 8: mod_base = OTHER; note = uridine
  modified_base 9: mod_base = OTHER; note = guanosine
  modified_base 10: mod_base = um
  modified_base 11: mod_base = OTHER; note = adenosine
  modified_base 12: mod_base = OTHER; note = guanosine
  modified_base 13: mod_base = OTHER; note = guanosine
  modified_base 14: mod_base = OTHER; note = adenosine
  modified_base 15: mod_base = OTHER; note = adenosine
  modified_base 16: mod_base = OTHER; note = uridine
  modified_base 17: mod_base = OTHER; note = cytidine
  modified_base 18: mod_base = OTHER; note = cytidine
  modified_base 19: mod_base = OTHER; note = uridine
  modified_base 20: mod_base = OTHER; note = 2'-deoxythymidine
  modified_base 21: mod_base = OTHER; note = 2'-deoxythymidine
  source 1..21: mol_type = other RNA
tgcttcctgtaggaatccttt

SEQ ID NO: 1306 - RNA, 21 nt, synthetic construct
  modified_base 20..21: mod_base = OTHER; note = thymine
  modified_base 1: mod_base = OTHER; note = uridine
  modified_base 2: mod_base = OTHER; note = uridine
  modified_base 3: mod_base = OTHER; note = guanosine
  modified_base 4: mod_base = OTHER; note = cytidine
  modified_base 5: mod_base = OTHER; note = uridine
  modified_base 6: mod_base = OTHER; note = uridine
  modified_base 7: mod_base = OTHER; note = cytidine
  modified_base 8: mod_base = OTHER; note = cytidine
  modified_base 9: mod_base = OTHER; note = uridine
  modified_base 10: mod_base = OTHER; note = guanosine
  modified_base 11: mod_base = um
  modified_base 12: mod_base = OTHER; note = adenosine
  modified_base 13: mod_base = OTHER; note = guanosine
  modified_base 14: mod_base = OTHER; note = guanosine
  modified_base 15: mod_base = OTHER; note = adenosine
  modified_base 16: mod_base = OTHER; note = adenosine
  modified_base 17: mod_base = OTHER; note = uridine
  modified_base 18: mod_base = OTHER; note = cytidine
  modified_base 19: mod_base = OTHER; note = cytidine
  modified_base 20: mod_base = OTHER; note = 2'-deoxythymidine
  modified_base 21: mod_base = OTHER; note = 2'-deoxythymidine
  source 1..21: mol_type = other RNA
ttgcttcctgtaggaatcctt

SEQ ID NO: 1307 - RNA, 21 nt, synthetic construct
  modified_base 20..21: mod_base = OTHER; note = thymine
  modified_base 1: mod_base = OTHER; note = cytidine
  modified_base 2: mod_base = OTHER; note = uridine
  modified_base 3: mod_base = OTHER; note = uridine
  modified_base 4: mod_base = OTHER; note = guanosine
  modified_base 5: mod_base = OTHER; note = cytidine
  modified_base 6: mod_base = OTHER; note = uridine
  modified_base 7: mod_base = OTHER; note = uridine
  modified_base 8: mod_base = OTHER; note = cytidine
  modified_base 9: mod_base = OTHER; note = cytidine
  modified_base 10: mod_base = OTHER; note = uridine
  modified_base 11: mod_base = OTHER; note = guanosine
  modified_base 12: mod_base = um
  modified_base 13: mod_base = OTHER; note = adenosine
  modified_base 14: mod_base = OTHER; note = guanosine
  modified_base 15: mod_base = OTHER; note = guanosine
  modified_base 16: mod_base = OTHER; note = adenosine
  modified_base 17: mod_base = OTHER; note = adenosine
  modified_base 18: mod_base = OTHER; note = uridine
  modified_base 19: mod_base = OTHER; note = cytidine
  modified_base 20: mod_base = OTHER; note = 2'-deoxythymidine
  modified_base 21: mod_base = OTHER; note = 2'-deoxythymidine
  source 1..21: mol_type = other RNA
cttgcttcctgtaggaatctt

SEQ ID NO: 1308 - RNA, 21 nt, synthetic construct
  modified_base 20..21: mod_base = OTHER; note = thymine
  modified_base 1: mod_base = OTHER; note = adenosine
  modified_base 2: mod_base = OTHER; note = cytidine
  modified_base 3: mod_base = OTHER; note = uridine
  modified_base 4: mod_base = OTHER; note = uridine
  modified_base 5: mod_base = OTHER; note = guanosine
  modified_base 6: mod_base = OTHER; note = cytidine
  modified_base 7: mod_base = OTHER; note = uridine
  modified_base 8: mod_base = OTHER; note = uridine
  modified_base 9: mod_base = OTHER; note = cytidine
  modified_base 10: mod_base = OTHER; note = cytidine
  modified_base 11: mod_base = OTHER; note = uridine
  modified_base 12: mod_base = OTHER; note = guanosine
  modified_base 13: mod_base = um
  modified_base 14: mod_base = OTHER; note = adenosine
  modified_base 15: mod_base = OTHER; note = guanosine
  modified_base 16: mod_base = OTHER; note = guanosine
  modified_base 17: mod_base = OTHER; note = adenosine
  modified_base 18: mod_base = OTHER; note = adenosine
  modified_base 19: mod_base = OTHER; note = uridine
  modified_base 20: mod_base = OTHER; note = 2'-deoxythymidine
  modified_base 21: mod_base = OTHER; note = 2'-deoxythymidine
  source 1..21: mol_type = other RNA
acttgcttcctgtaggaattt

SEQ ID NO: 1309 - RNA, 21 nt, synthetic construct
  modified_base 20..21: mod_base = OTHER; note = thymine
  modified_base 1: mod_base = um
  modified_base 2: mod_base = OTHER; note = adenosine
  modified_base 3: mod_base = OTHER; note = cytidine
  modified_base 4: mod_base = OTHER; note = uridine
  modified_base 5: mod_base = OTHER; note = uridine
  modified_base 6: mod_base = OTHER; note = guanosine
  modified_base 7: mod_base = OTHER; note = cytidine
  modified_base 8: mod_base = OTHER; note = uridine
  modified_base 9: mod_base = OTHER; note = uridine
  modified_base 10: mod_base = OTHER; note = cytidine
  modified_base 11: mod_base = OTHER; note = cytidine
  modified_base 12: mod_base = OTHER; note = uridine
  modified_base 13: mod_base = OTHER; note = guanosine
  modified_base 14: mod_base = um
  modified_base 15: mod_base = OTHER; note = adenosine
  modified_base 16: mod_base = OTHER; note = guanosine
  modified_base 17: mod_base = OTHER; note = guanosine
  modified_base 18: mod_base = OTHER; note = adenosine
  modified_base 19: mod_base = OTHER; note = adenosine
  modified_base 20: mod_base = OTHER; note = 2'-deoxythymidine
  modified_base 21: mod_base = OTHER; note = 2'-deoxythymidine
  source 1..21: mol_type = other RNA
tacttgcttcctgtaggaatt

SEQ ID NO: 1310 - RNA, 21 nt, synthetic construct
  modified_base 20..21: mod_base = OTHER; note = thymine
  modified_base 1: mod_base = OTHER; note = cytidine
  modified_base 2: mod_base = um
  modified_base 3: mod_base = OTHER; note = adenosine
  modified_base 4: mod_base = OTHER; note = cytidine
  modified_base 5: mod_base = OTHER; note = uridine
  modified_base 6: mod_base = OTHER; note = uridine
  modified_base 7: mod_base = OTHER; note = guanosine
  modified_base 8: mod_base = OTHER; note = cytidine
  modified_base 9: mod_base = OTHER; note = uridine
  modified_base 10: mod_base = OTHER; note = uridine
  modified_base 11: mod_base = OTHER; note = cytidine
  modified_base 12: mod_base = OTHER; note = cytidine
  modified_base 13: mod_base = OTHER; note = uridine
  modified_base 14: mod_base = OTHER; note = guanosine
  modified_base 15: mod_base = um
  modified_base 16: mod_base = OTHER; note = adenosine
  modified_base 17: mod_base = OTHER; note = guanosine
  modified_base 18: mod_base = OTHER; note = guanosine
  modified_base 19: mod_base = OTHER; note = adenosine
  modified_base 20: mod_base = OTHER; note = 2'-deoxythymidine
  modified_base 21: mod_base = OTHER; note = 2'-deoxythymidine
  source 1..21: mol_type = other RNA
ctacttgcttcctgtaggatt

SEQ ID NO: 1311 - RNA, 21 nt, synthetic construct
  modified_base 20..21: mod_base = OTHER; note = thymine
  modified_base 1: mod_base = OTHER; note = adenosine
  modified_base 2: mod_base = OTHER; note = cytidine
  modified_base 3: mod_base = um
  modified_base 4: mod_base = OTHER; note = adenosine
  modified_base 5: mod_base = OTHER; note = cytidine
  modified_base 6: mod_base = OTHER; note = uridine
  modified_base 7: mod_base = OTHER; note = uridine
  modified_base 8: mod_base = OTHER; note = guanosine
  modified_base 9: mod_base = OTHER; note = cytidine
  modified_base 10: mod_base = OTHER; note = uridine
  modified_base 11: mod_base = OTHER; note = uridine
  modified_base 12: mod_base = OTHER; note = cytidine
  modified_base 13: mod_base = OTHER; note = cytidine
  modified_base 14: mod_base = OTHER; note = uridine
  modified_base 15: mod_base = OTHER; note = guanosine
  modified_base 16: mod_base = um
  modified_base 17: mod_base = OTHER; note = adenosine
  modified_base 18: mod_base = OTHER; note = guanosine
  modified_base 19: mod_base = OTHER; note = guanosine
  modified_base 20: mod_base = OTHER; note = 2'-deoxythymidine
  modified_base 21: mod_base = OTHER; note = 2'-deoxythymidine
  source 1..21: mol_type = other RNA
actacttgcttcctgtaggtt

SEQ ID NO: 1312 - RNA, 21 nt, synthetic construct
  modified_base 20..21: mod_base = OTHER; note = thymine
  modified_base 1: mod_base = um
  modified_base 2: mod_base = OTHER; note = adenosine
  modified_base 3: mod_base = OTHER; note = cytidine
  modified_base 4: mod_base = um
  modified_base 5: mod_base = OTHER; note = adenosine
  modified_base 6: mod_base = OTHER; note = cytidine
  modified_base 7: mod_base = OTHER; note = uridine
  modified_base 8: mod_base = OTHER; note = uridine
  modified_base 9: mod_base = OTHER; note = guanosine
  modified_base 10: mod_base = OTHER; note = cytidine
  modified_base 11: mod_base = OTHER; note = uridine
  modified_base 12: mod_base = OTHER; note = uridine
  modified_base 13: mod_base = OTHER; note = cytidine
  modified_base 14: mod_base = OTHER; note = cytidine
  modified_base 15: mod_base = OTHER; note = uridine
  modified_base 16: mod_base = OTHER; note = guanosine
  modified_base 17: mod_base = um
  modified_base 18: mod_base = OTHER; note = adenosine
  modified_base 19: mod_base = OTHER; note = guanosine
  modified_base 20: mod_base = OTHER; note = 2'-deoxythymidine
  modified_base 21: mod_base = OTHER; note = 2'-deoxythymidine
  source 1..21: mol_type = other RNA
tactacttgcttcctgtagtt

SEQ ID NO: 1313 - RNA, 21 nt, synthetic construct
  modified_base 20..21: mod_base = OTHER; note = thymine
  modified_base 1: mod_base = OTHER; note = uridine
  modified_base 2: mod_base = um
  modified_base 3: mod_base = OTHER; note = adenosine
  modified_base 4: mod_base = OTHER; note = cytidine
  modified_base 5: mod_base = um
  modified_base 6: mod_base = OTHER; note = adenosine
  modified_base 7: mod_base = OTHER; note = cytidine
  modified_base 8: mod_base = OTHER; note = uridine
  modified_base 9: mod_base = OTHER; note = uridine
  modified_base 10: mod_base = OTHER; note = guanosine
  modified_base 11: mod_base = OTHER; note = cytidine
  modified_base 12: mod_base = OTHER; note = uridine
  modified_base 13: mod_base = OTHER; note = uridine
  modified_base 14: mod_base = OTHER; note = cytidine
  modified_base 15: mod_base = OTHER; note = cytidine
  modified_base 16: mod_base = OTHER; note = uridine
  modified_base 17: mod_base = OTHER; note = guanosine
  modified_base 18: mod_base = um
  modified_base 19: mod_base = OTHER; note = adenosine
  modified_base 20: mod_base = OTHER; note = 2'-deoxythymidine
  modified_base 21: mod_base = OTHER; note = 2'-deoxythymidine
  source 1..21: mol_type = other RNA
ttactacttgcttcctgtatt

SEQ ID NO: 1314 - RNA, 21 nt, synthetic construct
  modified_base 20..21: mod_base = OTHER; note = thymine
  modified_base 1: mod_base = OTHER; note = adenosine
  modified_base 2: mod_base = OTHER; note = uridine
  modified_base 3: mod_base = um
  modified_base 4: mod_base = OTHER; note = adenosine
  modified_base 5: mod_base = OTHER; note = cytidine
  modified_base 6: mod_base = um
  modified_base 7: mod_base = OTHER; note = adenosine
  modified_base 8: mod_base = OTHER; note = cytidine
  modified_base 9: mod_base = OTHER; note = uridine
  modified_base 10: mod_base = OTHER; note = uridine
  modified_base 11: mod_base = OTHER; note = guanosine
  modified_base 12: mod_base = OTHER; note = cytidine
  modified_base 13: mod_base = OTHER; note = uridine
  modified_base 14: mod_base = OTHER; note = uridine
  modified_base 15: mod_base = OTHER; note = cytidine
  modified_base 16: mod_base = OTHER; note = cytidine
  modified_base 17: mod_base = OTHER; note = uridine
  modified_base 18: mod_base = OTHER; note = guanosine
  modified_base 19: mod_base = OTHER; note = uridine
  modified_base 20: mod_base = OTHER; note = 2'-deoxythymidine
  modified_base 21: mod_base = OTHER; note = 2'-deoxythymidine
  source 1..21: mol_type = other RNA
attactacttgcttcctgttt

SEQ ID NO: 1315 - RNA, 21 nt, synthetic construct
  modified_base 20..21: mod_base = OTHER; note = thymine
  modified_base 1: mod_base = OTHER; note = adenosine
  modified_base 2: mod_base = OTHER; note = adenosine
  modified_base 3: mod_base = OTHER; note = uridine
  modified_base 4: mod_base = um
  modified_base 5: mod_base = OTHER; note = adenosine
  modified_base 6: mod_base = OTHER; note = cytidine
  modified_base 7: mod_base = um
  modified_base 8: mod_base = OTHER; note = adenosine
  modified_base 9: mod_base = OTHER; note = cytidine
  modified_base 10: mod_base = OTHER; note = uridine
  modified_base 11: mod_base = OTHER; note = uridine
  modified_base 12: mod_base = OTHER; note = guanosine
  modified_base 13: mod_base = OTHER; note = cytidine
  modified_base 14: mod_base = OTHER; note = uridine
  modified_base 15: mod_base = OTHER; note = uridine
  modified_base 16: mod_base = OTHER; note = cytidine
  modified_base 17: mod_base = OTHER; note = cytidine
  modified_base 18: mod_base = OTHER; note = uridine
  modified_base 19: mod_base = OTHER; note = guanosine
  modified_base 20: mod_base = OTHER; note = 2'-deoxythymidine
  modified_base 21: mod_base = OTHER; note = 2'-deoxythymidine
  source 1..21: mol_type = other RNA
aattactacttgcttcctgtt

SEQ ID NO: 1316 - RNA, 21 nt, synthetic construct
  modified_base 20..21: mod_base = OTHER; note = thymine
  modified_base 1: mod_base = OTHER; note = cytidine
  modified_base 2: mod_base = OTHER; note = uridine
  modified_base 3: mod_base = OTHER; note = guanosine
  modified_base 4: mod_base = OTHER; note = uridine
  modified_base 5: mod_base = OTHER; note = guanosine
  modified_base 6: mod_base = OTHER; note = uridine
  modified_base 7: mod_base = OTHER; note = cytidine
  modified_base 8: mod_base = OTHER; note = guanosine
  modified_base 9: mod_base = OTHER; note = adenosine
  modified_base 10: mod_base = OTHER; note = guanosine
  modified_base 11: mod_base = OTHER; note = adenosine
  modified_base 12: mod_base = OTHER; note = adenosine
  modified_base 13: mod_base = um
  modified_base 14: mod_base = OTHER; note = adenosine
  modified_base 15: mod_base = OTHER; note = uridine
  modified_base 16: mod_base = OTHER; note = cytidine
  modified_base 17: mod_base = cm
  modified_base 18: mod_base = OTHER; note = adenosine
  modified_base 19: mod_base = OTHER; note = adenosine
  modified_base 20: mod_base = OTHER; note = 2'-deoxythymidine
  modified_base 21: mod_base = OTHER; note = 2'-deoxythymidine
  source 1..21: mol_type = other RNA
ctgtgtcgagaatatccaatt

SEQ ID NO: 1317 - RNA, 21 nt, synthetic construct
  modified_base 20..21: mod_base = OTHER; note = thymine
  modified_base 1: mod_base = OTHER; note = guanosine
  modified_base 2: mod_base = OTHER; note = cytidine
  modified_base 3: mod_base = OTHER; note = uridine
  modified_base 4: mod_base = OTHER; note = guanosine
  modified_base 5: mod_base = OTHER; note = uridine
  modified_base 6: mod_base = OTHER; note = guanosine
  modified_base 7: mod_base = OTHER; note = uridine
  modified_base 8: mod_base = OTHER; note = cytidine
  modified_base 9: mod_base = OTHER; note = guanosine
  modified_base 10: mod_base = OTHER; note = adenosine
  modified_base 11: mod_base = OTHER; note = guanosine
  modified_base 12: mod_base = OTHER; note = adenosine
  modified_base 13: mod_base = OTHER; note = adenosine
  modified_base 14: mod_base = um
  modified_base 15: mod_base = OTHER; note = adenosine
  modified_base 16: mod_base = OTHER; note = uridine
  modified_base 17: mod_base = OTHER; note = cytidine
  modified_base 18: mod_base = cm
  modified_base 19: mod_base = OTHER; note = adenosine
  modified_base 20: mod_base = OTHER; note = 2'-deoxythymidine
  modified_base 21: mod_base = OTHER; note = 2'-deoxythymidine
  source 1..21: mol_type = other RNA
gctgtgtcgagaatatccatt

SEQ ID NO: 1318 - RNA, 21 nt, synthetic construct
  modified_base 20..21: mod_base = OTHER; note = thymine
  modified_base 1: mod_base = OTHER; note = uridine
  modified_base 2: mod_base = OTHER; note = guanosine
  modified_base 3: mod_base = OTHER; note = cytidine
  modified_base 4: mod_base = OTHER; note = uridine
  modified_base 5: mod_base = OTHER; note = guanosine
  modified_base 6: mod_base = OTHER; note = uridine
  modified_base 7: mod_base = OTHER; note = guanosine
  modified_base 8: mod_base = OTHER; note = uridine
  modified_base 9: mod_base = OTHER; note = cytidine
  modified_base 10: mod_base = OTHER; note = guanosine
  modified_base 11: mod_base = OTHER; note = adenosine
  modified_base 12: mod_base = OTHER; note = guanosine
  modified_base 13: mod_base = OTHER; note = adenosine
  modified_base 14: mod_base = OTHER; note = adenosine
  modified_base 15: mod_base = um
  modified_base 16: mod_base = OTHER; note = adenosine
  modified_base 17: mod_base = OTHER; note = uridine
  modified_base 18: mod_base = OTHER; note = cytidine
  modified_base 19: mod_base = OTHER; note = cytidine
  modified_base 20: mod_base = OTHER; note = 2'-deoxythymidine
  modified_base 21: mod_base = OTHER; note = 2'-deoxythymidine
  source 1..21: mol_type = other RNA
tgctgtgtcgagaatatcctt

SEQ ID NO: 1319 - RNA, 21 nt, synthetic construct
  modified_base 20..21: mod_base = OTHER; note = thymine
  modified_base 1: mod_base = OTHER; note = cytidine
  modified_base 2: mod_base = OTHER; note = cytidine
  modified_base 3: mod_base = OTHER; note = uridine
  modified_base 4: mod_base = OTHER; note = guanosine
  modified_base 5: mod_base = OTHER; note = cytidine
  modified_base 6: mod_base = OTHER; note = uridine
  modified_base 7: mod_base = OTHER; note = guanosine
  modified_base 8: mod_base = OTHER; note = uridine
  modified_base 9: mod_base = OTHER; note = guanosine
  modified_base 10: mod_base = OTHER; note = uridine
  modified_base 11: mod_base = OTHER; note = cytidine
  modified_base 12: mod_base = OTHER; note = guanosine
  modified_base 13: mod_base = OTHER; note = adenosine
  modified_base 14: mod_base = OTHER; note = guanosine
  modified_base 15: mod_base = OTHER; note = adenosine
  modified_base 16: mod_base = OTHER; note = adenosine
  modified_base 17: mod_base = um
  modified_base 18: mod_base = OTHER; note = adenosine
  modified_base 19: mod_base = OTHER; note = uridine
  modified_base 20: mod_base = OTHER; note = 2'-deoxythymidine
  modified_base 21: mod_base = OTHER; note = 2'-deoxythymidine
  source 1..21: mol_type = other RNA
cctgctgtgtcgagaatattt

SEQ ID NO: 1320 - DNA, 21 bp, synthetic construct
  modified_base 1: mod_base = OTHER; note = guanosine
  modified_base 2: mod_base = OTHER; note = adenosine
  modified_base 3: mod_base = OTHER; note = cytidine
  modified_base 4: mod_base = OTHER; note = cytidine
  modified_base 5: mod_base = OTHER; note = uridine
  modified_base 6: mod_base = OTHER; note = guanosine
  modified_base 7: mod_base = OTHER; note = cytidine
  modified_base 8: mod_base = OTHER; note = uridine
  modified_base 9: mod_base = OTHER; note = guanosine
  modified_base 10: mod_base = OTHER; note = uridine
  modified_base 11: mod_base = OTHER; note = guanosine
  modified_base 12: mod_base = OTHER; note = uridine
  modified_base 13: mod_base = OTHER; note = cytidine
  modified_base 14: mod_base = OTHER; note = guanosine
  modified_base 15: mod_base = OTHER; note = adenosine
  modified_base 16: mod_base = OTHER; note = guanosine
  modified_base 17: mod_base = OTHER; note = adenosine
  modified_base 18: mod_base = OTHER; note = adenosine
  modified_base 19: mod_base = OTHER; note = uridine
  modified_base 20: mod_base = OTHER; note = 2'-deoxythymidine
  modified_base 21: mod_base = OTHER; note = 2'-deoxythymidine
  source 1..21: mol_type = other DNA
gacctgctgtgtcgagaattt

SEQ ID NO: 1321 - DNA, 21 bp, synthetic construct
  modified_base 1: mod_base = OTHER; note = uridine
  modified_base 2: mod_base = OTHER; note = uridine
  modified_base 3: mod_base = OTHER; note = guanosine
  modified_base 4: mod_base = OTHER; note = adenosine
  modified_base 5: mod_base = OTHER; note = cytidine
  modified_base 6: mod_base = OTHER; note = cytidine
  modified_base 7: mod_base = OTHER; note = uridine
  modified_base 8: mod_base = OTHER; note = guanosine
  modified_base 9: mod_base = OTHER; note = cytidine
  modified_base 10: mod_base = OTHER; note = uridine
  modified_base 11: mod_base = OTHER; note = guanosine
  modified_base 12: mod_base = OTHER; note = uridine
  modified_base 13: mod_base = OTHER; note = guanosine
  modified_base 14: mod_base = OTHER; note = uridine
  modified_base 15: mod_base = OTHER; note = cytidine
  modified_base 16: mod_base = OTHER; note = guanosine
  modified_base 17: mod_base = OTHER; note = adenosine
  modified_base 18: mod_base = OTHER; note = guanosine
  modified_base 19: mod_base = OTHER; note = adenosine
  modified_base 20: mod_base = OTHER; note = 2'-deoxythymidine
  modified_base 21: mod_base = OTHER; note = 2'-deoxythymidine
  source 1..21: mol_type = other DNA
ttgacctgctgtgtcgagatt

SEQ ID NO: 1322 - DNA, 21 bp, synthetic construct
  modified_base 1: mod_base = OTHER; note = cytidine
  modified_base 2: mod_base = OTHER; note = uridine
  modified_base 3: mod_base = OTHER; note = uridine
  modified_base 4: mod_base = OTHER; note = guanosine
  modified_base 5: mod_base = OTHER; note = adenosine
  modified_base 6: mod_base = OTHER; note = cytidine
  modified_base 7: mod_base = OTHER; note = cytidine
  modified_base 8: mod_base = OTHER; note = uridine
  modified_base 9: mod_base = OTHER; note = guanosine
  modified_base 10: mod_base = OTHER; note = cytidine
  modified_base 11: mod_base = OTHER; note = uridine
  modified_base 12: mod_base = OTHER; note = guanosine
  modified_base 13: mod_base = OTHER; note = uridine
  modified_base 14: mod_base = OTHER; note = guanosine
  modified_base 15: mod_base = OTHER; note = uridine
  modified_base 16: mod_base = OTHER; note = cytidine
  modified_base 17: mod_base = OTHER; note = guanosine
  modified_base 18: mod_base = OTHER; note = adenosine
  modified_base 19: mod_base = OTHER; note = guanosine
  modified_base 20: mod_base = OTHER; note = 2'-deoxythymidine
  modified_base 21: mod_base = OTHER; note = 2'-deoxythymidine
  source 1..21: mol_type = other DNA
cttgacctgctgtgtcgagtt

SEQ ID NO: 1323 - DNA, 21 bp, synthetic construct
  modified_base 1: mod_base = OTHER; note = uridine
  modified_base 2: mod_base = OTHER; note = cytidine
  modified_base 3: mod_base = OTHER; note = uridine
  modified_base 4: mod_base = OTHER; note = uridine
  modified_base 5: mod_base = OTHER; note = guanosine
  modified_base 6: mod_base = OTHER; note = adenosine
  modified_base 7: mod_base = OTHER; note = cytidine
  modified_base 8: mod_base = OTHER; note = cytidine
  modified_base 9: mod_base = OTHER; note = uridine
  modified_base 10: mod_base = OTHER; note = guanosine
  modified_base 11: mod_base = OTHER; note = cytidine
  modified_base 12: mod_base = OTHER; note = uridine
  modified_base 13: mod_base = OTHER; note = guanosine
  modified_base 14: mod_base = OTHER; note = uridine
  modified_base 15: mod_base = OTHER; note = guanosine
  modified_base 16: mod_base = OTHER; note = uridine
  modified_base 17: mod_base = OTHER; note = cytidine
  modified_base 18: mod_base = OTHER; note = guanosine
  modified_base 19: mod_base = OTHER; note = adenosine
  modified_base 20: mod_base = OTHER; note = 2'-deoxythymidine
  modified_base 21: mod_base = OTHER; note = 2'-deoxythymidine
  source 1..21: mol_type = other DNA
tcttgacctgctgtgtcgatt

SEQ ID NO: 1324 - DNA, 21 bp, synthetic construct
  modified_base 1: mod_base = OTHER; note = cytidine
  modified_base 2: mod_base = OTHER; note = uridine
  modified_base 3: mod_base = OTHER; note = cytidine
  modified_base 4: mod_base = OTHER; note = uridine
  modified_base 5: mod_base = OTHER; note = uridine
  modified_base 6: mod_base = OTHER; note = guanosine
  modified_base 7: mod_base = OTHER; note = adenosine
  modified_base 8: mod_base = OTHER; note = cytidine
  modified_base 9: mod_base = OTHER; note = cytidine
  modified_base 10: mod_base = OTHER; note = uridine
  modified_base 11: mod_base = OTHER; note = guanosine
  modified_base 12: mod_base = OTHER; note = cytidine
  modified_base 13: mod_base = OTHER; note = uridine
  modified_base 14: mod_base = OTHER; note = guanosine
  modified_base 15: mod_base = OTHER; note = uridine
  modified_base 16: mod_base = OTHER; note = guanosine
  modified_base 17: mod_base = OTHER; note = uridine
  modified_base 18: mod_base = OTHER; note = cytidine
  modified_base 19: mod_base = OTHER; note = guanosine
  modified_base 20: mod_base = OTHER; note = 2'-deoxythymidine
  modified_base 21: mod_base = OTHER; note = 2'-deoxythymidine
  source 1..21: mol_type = other DNA
ctcttgacctgctgtgtcgtt

SEQ ID NO: 1325 - DNA, 21 bp, synthetic construct
  modified_base 1: mod_base = OTHER; note = cytidine
  modified_base 2: mod_base = OTHER; note = cytidine
  modified_base 3: mod_base = OTHER; note = uridine
  modified_base 4: mod_base = OTHER; note = cytidine
  modified_base 5: mod_base = OTHER; note = uridine
  modified_base 6: mod_base = OTHER; note = uridine
  modified_base 7: mod_base = OTHER; note = guanosine
  modified_base 8: mod_base = OTHER; note = adenosine
  modified_base 9: mod_base = OTHER; note = cytidine
  modified_base 10: mod_base = OTHER; note = cytidine
  modified_base 11: mod_base = OTHER; note = uridine
  modified_base 12: mod_base = OTHER; note = guanosine
  modified_base 13: mod_base = OTHER; note = cytidine
  modified_base 14: mod_base = OTHER; note = uridine
  modified_base 15: mod_base = OTHER; note = guanosine
  modified_base 16: mod_base = OTHER; note = uridine
  modified_base 17: mod_base = OTHER; note = guanosine
  modified_base 18: mod_base = OTHER; note = uridine
  modified_base 19: mod_base = OTHER; note = cytidine
  modified_base 20: mod_base = OTHER; note = 2'-deoxythymidine
  modified_base 21: mod_base = OTHER; note = 2'-deoxythymidine
  source 1..21: mol_type = other DNA
cctcttgacctgctgtgtctt

SEQ ID NO: 1326 - DNA, 21 bp, synthetic construct
  modified_base 1: mod_base = OTHER; note = uridine
  modified_base 2: mod_base = OTHER; note = cytidine
  modified_base 3: mod_base = OTHER; note = cytidine
  modified_base 4: mod_base = OTHER; note = uridine
  modified_base 5: mod_base = OTHER; note = cytidine
  modified_base 6: mod_base = OTHER; note = uridine
  modified_base 7: mod_base = OTHER; note = uridine
  modified_base 8: mod_base = OTHER; note = guanosine
  modified_base 9: mod_base = OTHER; note = adenosine
  modified_base 10: mod_base = OTHER; note = cytidine
  modified_base 11: mod_base = OTHER; note = cytidine
  modified_base 12: mod_base = OTHER; note = uridine
  modified_base 13: mod_base = OTHER; note = guanosine
  modified_base 14: mod_base = OTHER; note = cytidine
  modified_base 15: mod_base = OTHER; note = uridine
  modified_base 16: mod_base = OTHER; note = guanosine
  modified_base 17: mod_base = OTHER; note = uridine
  modified_base 18: mod_base = OTHER; note = guanosine
  modified_base 19: mod_base = OTHER; note = uridine
  modified_base 20: mod_base = OTHER; note = 2'-deoxythymidine
  modified_base 21: mod_base = OTHER; note = 2'-deoxythymidine
  source 1..21: mol_type = other DNA
tcctcttgacctgctgtgttt

SEQ ID NO: 1327 - DNA, 21 bp, synthetic construct
  modified_base 1: mod_base = OTHER; note = cytidine
  modified_base 2: mod_base = OTHER; note = uridine
  modified_base 3: mod_base = OTHER; note = cytidine
  modified_base 4: mod_base = OTHER; note = cytidine
  modified_base 5: mod_base = OTHER; note = uridine
  modified_base 6: mod_base = OTHER; note = cytidine
  modified_base 7: mod_base = OTHER; note = uridine
  modified_base 8: mod_base = OTHER; note = uridine
  modified_base 9: mod_base = OTHER; note = guanosine
  modified_base 10: mod_base = OTHER; note = adenosine
  modified_base 11: mod_base = OTHER; note = cytidine
  modified_base 12: mod_base = OTHER; note = cytidine
  modified_base 13: mod_base = OTHER; note = uridine
  modified_base 14: mod_base = OTHER; note = guanosine
  modified_base 15: mod_base = OTHER; note = cytidine
  modified_base 16: mod_base = OTHER; note = uridine
  modified_base 17: mod_base = OTHER; note = guanosine
  modified_base 18: mod_base = OTHER; note = uridine
  modified_base 19: mod_base = OTHER; note = guanosine
  modified_base 20: mod_base = OTHER; note = 2'-deoxythymidine
  modified_base 21: mod_base = OTHER; note = 2'-deoxythymidine
  source 1..21: mol_type = other DNA
ctcctcttgacctgctgtgtt

SEQ ID NO: 1328 - DNA, 21 bp, synthetic construct
  modified_base 1: mod_base = OTHER; note = adenosine
  modified_base 2: mod_base = OTHER; note = cytidine
  modified_base 3: mod_base = OTHER; note = uridine
  modified_base 4: mod_base = OTHER; note = cytidine
  modified_base 5: mod_base = OTHER; note = cytidine
  modified_base 6: mod_base = OTHER; note = uridine
  modified_base 7: mod_base = OTHER; note = cytidine
  modified_base 8: mod_base = OTHER; note = uridine
  modified_base 9: mod_base = OTHER; note = uridine
  modified_base 10: mod_base = OTHER; note = guanosine
  modified_base 11: mod_base = OTHER; note = adenosine
  modified_base 12: mod_base = OTHER; note = cytidine
  modified_base 13: mod_base = OTHER; note = cytidine
  modified_base 14: mod_base = OTHER; note = uridine
  modified_base 15: mod_base = OTHER; note = guanosine
  modified_base 16: mod_base = OTHER; note = cytidine
  modified_base 17: mod_base = OTHER; note = uridine
  modified_base 18: mod_base = OTHER; note = guanosine
  modified_base 19: mod_base = OTHER; note = uridine
  modified_base 20: mod_base = OTHER; note = 2'-deoxythymidine
  modified_base 21: mod_base = OTHER; note = 2'-deoxythymidine
  source 1..21: mol_type = other DNA
actcctcttgacctgctgttt

SEQ ID NO: 1329 - RNA, 21 nt, synthetic construct
  modified_base 20..21: mod_base = OTHER; note = thymine
  modified_base 1: mod_base = um
  modified_base 2: mod_base = OTHER; note = adenosine
  modified_base 3: mod_base = OTHER; note = cytidine
  modified_base 4: mod_base = OTHER; note = uridine
  modified_base 5: mod_base = OTHER; note = cytidine
  modified_base 6: mod_base = OTHER; note = cytidine
  modified_base 7: mod_base = OTHER; note = uridine
  modified_base 8: mod_base = OTHER; note = cytidine
  modified_base 9: mod_base = OTHER; note = uridine
  modified_base 10: mod_base = OTHER; note = uridine
  modified_base 11: mod_base = OTHER; note = guanosine
  modified_base 12: mod_base = OTHER; note = adenosine
  modified_base 13: mod_base = OTHER; note = cytidine
  modified_base 14: mod_base = OTHER; note = cytidine
  modified_base 15: mod_base = OTHER; note = uridine
  modified_base 16: mod_base = OTHER; note = guanosine
  modified_base 17: mod_base = OTHER; note = cytidine
  modified_base 18: mod_base = OTHER; note = uridine
  modified_base 19: mod_base = OTHER; note = guanosine
  modified_base 20: mod_base = OTHER; note = 2'-deoxythymidine
  modified_base 21: mod_base = OTHER; note = 2'-deoxythymidine
  source 1..21: mol_type = other RNA
tactcctcttgacctgctgtt

SEQ ID NO: 1330 - RNA, 21 nt, synthetic construct
  modified_base 20..21: mod_base = OTHER; note = thymine
  modified_base 1: mod_base = OTHER; note = guanosine
  modified_base 2: mod_base = um
  modified_base 3: mod_base = OTHER; note = adenosine
  modified_base 4: mod_base = OTHER; note = cytidine
  modified_base 5: mod_base = OTHER; note = uridine
  modified_base 6: mod_base = OTHER; note = cytidine
  modified_base 7: mod_base = OTHER; note = cytidine
  modified_base 8: mod_base = OTHER; note = uridine
  modified_base 9: mod_base = OTHER; note = cytidine
  modified_base 10: mod_base = OTHER; note = uridine
  modified_base 11: mod_base = OTHER; note = uridine
  modified_base 12: mod_base = OTHER; note = guanosine
  modified_base 13: mod_base = OTHER; note = adenosine
  modified_base 14: mod_base = OTHER; note = cytidine
  modified_base 15: mod_base = OTHER; note = cytidine
  modified_base 16: mod_base = OTHER; note = uridine
  modified_base 17: mod_base = OTHER; note = guanosine
  modified_base 18: mod_base = OTHER; note = cytidine
  modified_base 19: mod_base = OTHER; note = uridine
  modified_base 20: mod_base = OTHER; note = 2'-deoxythymidine
  modified_base 21: mod_base = OTHER; note = 2'-deoxythymidine
  source 1..21: mol_type = other RNA
gtactcctcttgacctgcttt

SEQ ID NO: 1331 - RNA, 21 nt, synthetic construct
  modified_base 20..21: mod_base = OTHER; note = thymine
  modified_base 1: mod_base = OTHER; note = uridine
  modified_base 2: mod_base = OTHER; note = guanosine
  modified_base 3: mod_base = um
  modified_base 4: mod_base = OTHER; note = adenosine
  modified_base 5: mod_base = OTHER; note = cytidine
  modified_base 6: mod_base = OTHER; note = uridine
  modified_base 7: mod_base = OTHER; note = cytidine
  modified_base 8: mod_base = OTHER; note = cytidine
  modified_base 9: mod_base = OTHER; note = uridine
  modified_base 10: mod_base = OTHER; note = cytidine
  modified_base 11: mod_base = OTHER; note = uridine
  modified_base 12: mod_base = OTHER; note = uridine
  modified_base 13: mod_base = OTHER; note = guanosine
  modified_base 14: mod_base = OTHER; note = adenosine
  modified_base 15: mod_base = OTHER; note = cytidine
  modified_base 16: mod_base = OTHER; note = cytidine
  modified_base 17: mod_base = OTHER; note = uridine
  modified_base 18: mod_base = OTHER; note = guanosine
  modified_base 19: mod_base = OTHER; note = cytidine
  modified_base 20: mod_base = OTHER; note = 2'-deoxythymidine
  modified_base 21: mod_base = OTHER; note = 2'-deoxythymidine
  source 1..21: mol_type = other RNA
tgtactcctcttgacctgctt

SEQ ID NO: 1332 - RNA, 21 nt, synthetic construct
  modified_base 20..21: mod_base = OTHER; note = thymine
  modified_base 1: mod_base = OTHER; note = cytidine
  modified_base 2: mod_base = OTHER; note = uridine
  modified_base 3: mod_base = OTHER; note = guanosine
  modified_base 4: mod_base = um
  modified_base 5: mod_base = OTHER; note = adenosine
  modified_base 6: mod_base = OTHER; note = cytidine
  modified_base 7: mod_base = OTHER; note = uridine
  modified_base 8: mod_base = OTHER; note = cytidine
  modified_base 9: mod_base = OTHER; note = cytidine
  modified_base 10: mod_base = OTHER; note = uridine
  modified_base 11: mod_base = OTHER; note = cytidine
  modified_base 12: mod_base = OTHER; note = uridine
  modified_base 13: mod_base = OTHER; note = uridine
  modified_base 14: mod_base = OTHER; note = guanosine
  modified_base 15: mod_base = OTHER; note = adenosine
  modified_base 16: mod_base = OTHER; note = cytidine
  modified_base 17: mod_base = OTHER; note = cytidine
  modified_base 18: mod_base = OTHER; note = uridine
  modified_base 19: mod_base = OTHER; note = guanosine
  modified_base 20: mod_base = OTHER; note = 2'-deoxythymidine
  modified_base 21: mod_base = OTHER; note = 2'-deoxythymidine
  source 1..21: mol_type = other RNA
ctgtactcctcttgacctgtt

SEQ ID NO: 1333 - RNA, 21 nt, synthetic construct
  modified_base 20..21: mod_base = OTHER; note = thymine
  modified_base 1: mod_base = OTHER; note = adenosine
  modified_base 2: mod_base = OTHER; note = cytidine
  modified_base 3: mod_base = OTHER; note = uridine
  modified_base 4: mod_base = OTHER; note = guanosine
  modified_base 5: mod_base = um
  modified_base 6: mod_base = OTHER; note = adenosine
  modified_base 7: mod_base = OTHER; note = cytidine
  modified_base 8: mod_base = OTHER; note = uridine
  modified_base 9: mod_base = OTHER; note = cytidine
  modified_base 10: mod_base = OTHER; note = cytidine
  modified_base 11: mod_base = OTHER; note = uridine
  modified_base 12: mod_base = OTHER; note = cytidine
  modified_base 13: mod_base = OTHER; note = uridine
  modified_base 14: mod_base = OTHER; note = uridine
  modified_base 15: mod_base = OTHER; note = guanosine
  modified_base 16: mod_base = OTHER; note = adenosine
  modified_base 17: mod_base = OTHER; note = cytidine
  modified_base 18: mod_base = OTHER; note = cytidine
  modified_base 19: mod_base = OTHER; note = uridine
  modified_base 20: mod_base = OTHER; note = 2'-deoxythymidine
  modified_base 21: mod_base = OTHER; note = 2'-deoxythymidine
  source 1..21: mol_type = other RNA
actgtactcctcttgaccttt

SEQ ID NO: 1334 - RNA, 21 nt, synthetic construct
  modified_base 20..21: mod_base = OTHER; note = thymine
  modified_base 1: mod_base = cm
  modified_base 2: mod_base = OTHER; note = adenosine
  modified_base 3: mod_base = OTHER; note = cytidine
  modified_base 4: mod_base = OTHER; note = uridine
  modified_base 5: mod_base = OTHER; note = guanosine
  modified_base 6: mod_base = um
  modified_base 7: mod_base = OTHER; note = adenosine
  modified_base 8: mod_base = OTHER; note = cytidine
  modified_base 9: mod_base = OTHER; note = uridine
  modified_base 10: mod_base = OTHER; note = cytidine
  modified_base 11: mod_base = OTHER; note = cytidine
  modified_base 12: mod_base = OTHER; note = uridine
  modified_base 13: mod_base = OTHER; note = cytidine
  modified_base 14: mod_base = OTHER; note = uridine
  modified_base 15: mod_base = OTHER; note = uridine
  modified_base 16: mod_base = OTHER; note = guanosine
  modified_base 17: mod_base = OTHER; note = adenosine
  modified_base 18: mod_base = OTHER; note = cytidine
  modified_base 19: mod_base = OTHER; note = cytidine
  modified_base 20: mod_base = OTHER; note = 2'-deoxythymidine
  modified_base 21: mod_base = OTHER; note = 2'-deoxythymidine
  source 1..21: mol_type = other RNA
cactgtactcctcttgacctt

SEQ ID NO: 1335 - RNA, 21 nt, synthetic construct
  modified_base 20..21: mod_base = OTHER; note = thymine
  modified_base 1: mod_base = OTHER; note = guanosine
  modified_base 2: mod_base = cm
  modified_base 3: mod_base = OTHER; note = adenosine
  modified_base 4: mod_base = OTHER; note = cytidine
  modified_base 5: mod_base = OTHER; note = uridine
  modified_base 6: mod_base = OTHER; note = guanosine
  modified_base 7: mod_base = um
  modified_base 8: mod_base = OTHER; note = adenosine
  modified_base 9: mod_base = OTHER; note = cytidine
  modified_base 10: mod_base = OTHER; note = uridine
  modified_base 11: mod_base = OTHER; note = cytidine
  modified_base 12: mod_base = OTHER; note = cytidine
  modified_base 13: mod_base = OTHER; note = uridine
  modified_base 14: mod_base = OTHER; note = cytidine
  modified_base 15: mod_base = OTHER; note = uridine
  modified_base 16: mod_base = OTHER; note = uridine
  modified_base 17: mod_base = OTHER; note = guanosine
  modified_base 18: mod_base = OTHER; note = adenosine
  modified_base 19: mod_base = OTHER; note = cytidine
  modified_base 20: mod_base = OTHER; note = 2'-deoxythymidine
  modified_base 21: mod_base = OTHER; note = 2'-deoxythymidine
  source 1..21: mol_type = other RNA
gcactgtactcctcttgactt

SEQ ID NO: 1336 - RNA, 21 nt, synthetic construct
  modified_base 20..21: mod_base = OTHER; note = thymine
  modified_base 1: mod_base = OTHER; note = uridine
  modified_base 2: mod_base = OTHER; note = guanosine
  modified_base 3: mod_base = cm
  modified_base 4: mod_base = OTHER; note = adenosine
  modified_base 5: mod_base = OTHER; note = cytidine
  modified_base 6: mod_base = OTHER; note = uridine
  modified_base 7: mod_base = OTHER; note = guanosine
  modified_base 8: mod_base = um
  modified_base 9: mod_base = OTHER; note = adenosine
  modified_base 10: mod_base = OTHER; note = cytidine
  modified_base 11: mod_base = OTHER; note = uridine
  modified_base 12: mod_base = OTHER; note = cytidine
  modified_base 13: mod_base = OTHER; note = cytidine
  modified_base 14: mod_base = OTHER; note = uridine
  modified_base 15: mod_base = OTHER; note = cytidine
  modified_base 16: mod_base = OTHER; note = uridine
  modified_base 17: mod_base = OTHER; note = uridine
  modified_base 18: mod_base = OTHER; note = guanosine
  modified_base 19: mod_base = OTHER; note = adenosine
  modified_base 20: mod_base = OTHER; note = 2'-deoxythymidine
  modified_base 21: mod_base = OTHER; note = 2'-deoxythymidine
  source 1..21: mol_type = other RNA
tgcactgtactcctcttgatt

SEQ ID NO: 1337 - RNA, 21 nt, synthetic construct
  modified_base 20..21: mod_base = OTHER; note = thymine
  modified_base 1: mod_base = OTHER; note = uridine
  modified_base 2: mod_base = OTHER; note = uridine
  modified_base 3: mod_base = OTHER; note = guanosine
  modified_base 4: mod_base = cm
  modified_base 5: mod_base = OTHER; note = adenosine
  modified_base 6: mod_base = OTHER; note = cytidine
  modified_base 7: mod_base = OTHER; note = uridine
  modified_base 8: mod_base = OTHER; note = guanosine
  modified_base 9: mod_base = um
  modified_base 10: mod_base = OTHER; note = adenosine
  modified_base 11: mod_base = OTHER; note = cytidine
  modified_base 12: mod_base = OTHER; note = uridine
  modified_base 13: mod_base = OTHER; note = cytidine
  modified_base 14: mod_base = OTHER; note = cytidine
  modified_base 15: mod_base = OTHER; note = uridine
  modified_base 16: mod_base = OTHER; note = cytidine
  modified_base 17: mod_base = OTHER; note = uridine
  modified_base 18: mod_base = OTHER; note = uridine
  modified_base 19: mod_base = OTHER; note = guanosine
  modified_base 20: mod_base = OTHER; note = 2'-deoxythymidine
  modified_base 21: mod_base = OTHER; note = 2'-deoxythymidine
  source 1..21: mol_type = other RNA
ttgcactgtactcctcttgtt

SEQ ID NO: 1338 - RNA, 21 nt, synthetic construct
  modified_base 20..21: mod_base = OTHER; note = thymine
  modified_base 1: mod_base = OTHER; note = adenosine
  modified_base 2: mod_base = OTHER; note = uridine
  modified_base 3: mod_base = OTHER; note = uridine
  modified_base 4: mod_base = OTHER; note = guanosine
  modified_base 5: mod_base = cm
  modified_base 6: mod_base = OTHER; note = adenosine
  modified_base 7: mod_base = OTHER; note = cytidine
  modified_base 8: mod_base = OTHER; note = uridine
  modified_base 9: mod_base = OTHER; note = guanosine
  modified_base 10: mod_base = um
  modified_base 11: mod_base = OTHER; note = adenosine
  modified_base 12: mod_base = OTHER; note = cytidine
  modified_base 13: mod_base = OTHER; note = uridine
  modified_base 14: mod_base = OTHER; note = cytidine
  modified_base 15: mod_base = OTHER; note = cytidine
  modified_base 16: mod_base = OTHER; note = uridine
  modified_base 17: mod_base = OTHER; note = cytidine
  modified_base 18: mod_base = OTHER; note = uridine
  modified_base 19: mod_base = OTHER; note = uridine
  modified_base 20: mod_base = OTHER; note = 2'-deoxythymidine
  modified_base 21: mod_base = OTHER; note = 2'-deoxythymidine
  source 1..21: mol_type = other RNA
attgcactgtactcctctttt

SEQ ID NO: 1339 - RNA, 21 nt, synthetic construct
  modified_base 20..21: mod_base = OTHER; note = thymine
  modified_base 1: mod_base = cm
  modified_base 2: mod_base = OTHER; note = adenosine
  modified_base 3: mod_base = OTHER; note = uridine
  modified_base 4: mod_base = OTHER; note = uridine
  modified_base 5: mod_base = OTHER; note = guanosine
  modified_base 6: mod_base = cm
  modified_base 7: mod_base = OTHER; note = adenosine
  modified_base 8: mod_base = OTHER; note = cytidine
  modified_base 9: mod_base = OTHER; note = uridine
  modified_base 10: mod_base = OTHER; note = guanosine
  modified_base 11: mod_base = um
  modified_base 12: mod_base = OTHER; note = adenosine
  modified_base 13: mod_base = OTHER; note = cytidine
  modified_base 14: mod_base = OTHER; note = uridine
  modified_base 15: mod_base = OTHER; note = cytidine
  modified_base 16: mod_base = OTHER; note = cytidine
  modified_base 17: mod_base = OTHER; note = uridine
  modified_base 18: mod_base = OTHER; note = cytidine
  modified_base 19: mod_base = OTHER; note = uridine
  modified_base 20: mod_base = OTHER; note = 2'-deoxythymidine
  modified_base 21: mod_base = OTHER; note = 2'-deoxythymidine
  source 1..21: mol_type = other RNA
cattgcactgtactcctcttt

SEQ ID NO: 1340 - RNA, 21 nt, synthetic construct
  modified_base 20..21: mod_base = OTHER; note = thymine
  modified_base 1: mod_base = OTHER; note = uridine
  modified_base 2: mod_base = cm
  modified_base 3: mod_base = OTHER; note = adenosine
  modified_base 4: mod_base = OTHER; note = uridine
  modified_base 5: mod_base = OTHER; note = uridine
  modified_base 6: mod_base = OTHER; note = guanosine
  modified_base 7: mod_base = cm
  modified_base 8: mod_base = OTHER; note = adenosine
  modified_base 9: mod_base = OTHER; note = cytidine
  modified_base 10: mod_base = OTHER; note = uridine
  modified_base 11: mod_base = OTHER; note = guanosine
  modified_base 12: mod_base = um
  modified_base 13: mod_base = OTHER; note = adenosine
  modified_base 14: mod_base = OTHER; note = cytidine
  modified_base 15: mod_base = OTHER; note = uridine
  modified_base 16: mod_base = OTHER; note = cytidine
  modified_base 17: mod_base = OTHER; note = cytidine
  modified_base 18: mod_base = OTHER; note = uridine
  modified_base 19: mod_base = OTHER; note = cytidine
  modified_base 20: mod_base = OTHER; note = 2'-deoxythymidine
  modified_base 21: mod_base = OTHER; note = 2'-deoxythymidine
  source 1..21: mol_type = other RNA
tcattgcactgtactcctctt

SEQ ID NO: 1341 - RNA, 21 nt, synthetic construct
  modified_base 20..21: mod_base = OTHER; note = thymine
  modified_base 1: mod_base = OTHER; note = cytidine
  modified_base 2: mod_base = OTHER; note = uridine
  modified_base 3: mod_base = cm
  modified_base 4: mod_base = OTHER; note = adenosine
  modified_base 5: mod_base = OTHER; note = uridine
  modified_base 6: mod_base = OTHER; note = uridine
  modified_base 7: mod_base = OTHER; note = guanosine
  modified_base 8: mod_base = cm
  modified_base 9: mod_base = OTHER; note = adenosine
  modified_base 10: mod_base = OTHER; note = cytidine
  modified_base 11: mod_base = OTHER; note = uridine
  modified_base 12: mod_base = OTHER; note = guanosine
  modified_base 13: mod_base = um
  modified_base 14: mod_base = OTHER; note = adenosine
  modified_base 15: mod_base = OTHER; note = cytidine
  modified_base 16: mod_base = OTHER; note = uridine
  modified_base 17: mod_base = OTHER; note = cytidine
  modified_base 18: mod_base = OTHER; note = cytidine
  modified_base 19: mod_base = OTHER; note = uridine
  modified_base 20: mod_base = OTHER; note = 2'-deoxythymidine
  modified_base 21: mod_base = OTHER; note = 2'-deoxythymidine
  source 1..21: mol_type = other RNA
ctcattgcactgtactccttt

SEQ ID NO: 1342 - RNA, 21 nt, synthetic construct
  modified_base 20..21: mod_base = OTHER; note = thymine
  modified_base 1: mod_base = OTHER; note = cytidine
  modified_base 2: mod_base = OTHER; note = cytidine
  modified_base 3: mod_base = OTHER; note = uridine
  modified_base 4: mod_base = cm
  modified_base 5: mod_base = OTHER; note = adenosine
  modified_base 6: mod_base = OTHER; note = uridine
  modified_base 7: mod_base = OTHER; note = uridine
  modified_base 8: mod_base = OTHER; note = guanosine
  modified_base 9: mod_base = cm
  modified_base 10: mod_base = OTHER; note = adenosine
  modified_base 11: mod_base = OTHER; note = cytidine
  modified_base 12: mod_base = OTHER; note = uridine
  modified_base 13: mod_base = OTHER; note = guanosine
  modified_base 14: mod_base = um
  modified_base 15: mod_base = OTHER; note = adenosine
  modified_base 16: mod_base = OTHER; note = cytidine
  modified_base 17: mod_base = OTHER; note = uridine
  modified_base 18: mod_base = OTHER; note = cytidine
  modified_base 19: mod_base = OTHER; note = cytidine
  modified_base 20: mod_base = OTHER; note = 2'-deoxythymidine
  modified_base 21: mod_base = OTHER; note = 2'-deoxythymidine
  source 1..21: mol_type = other RNA
cctcattgcactgtactcctt

SEQ ID NO: 1343 - RNA, 21 nt, synthetic construct
  modified_base 20..21: mod_base = OTHER; note = thymine
  modified_base 1: mod_base = OTHER; note = cytidine
  modified_base 2: mod_base = OTHER; note = cytidine
  modified_base 3: mod_base = OTHER; note = cytidine
  modified_base 4: mod_base = OTHER; note = uridine
  modified_base 5: mod_base = cm
  modified_base 6: mod_base = OTHER; note = adenosine
  modified_base 7: mod_base = OTHER; note = uridine
  modified_base 8: mod_base = OTHER; note = uridine
  modified_base 9: mod_base = OTHER; note = guanosine
  modified_base 10: mod_base = cm
  modified_base 11: mod_base = OTHER; note = adenosine
  modified_base 12: mod_base = OTHER; note = cytidine
  modified_base 13: mod_base = OTHER; note = uridine
  modified_base 14: mod_base = OTHER; note = guanosine
  modified_base 15: mod_base = um
  modified_base 16: mod_base = OTHER; note = adenosine
  modified_base 17: mod_base = OTHER; note = cytidine
  modified_base 18: mod_base = OTHER; note = uridine
  modified_base 19: mod_base = OTHER; note = cytidine
  modified_base 20: mod_base = OTHER; note = 2'-deoxythymidine
  modified_base 21: mod_base = OTHER; note = 2'-deoxythymidine
  source 1..21: mol_type = other RNA
ccctcattgcactgtactctt

SEQ ID NO: 1344 - DNA, 21 bp, synthetic construct
  modified_base 1: mod_base = cm
  modified_base 2: mod_base = OTHER; note = adenosine
  modified_base 3: mod_base = cm
  modified_base 4: mod_base = OTHER; note = adenosine
  modified_base 5: mod_base = OTHER; note = adenosine
  modified_base 6: mod_base = OTHER; note = adenosine
  modified_base 7: mod_base = OTHER; note = guanosine
  modified_base 8: mod_base = OTHER; note = adenosine
  modified_base 9: mod_base = OTHER; note = adenosine
  modified_base 10: mod_base = OTHER; note = adenosine
  modified_base 11: mod_base = OTHER; note = guanosine
  modified_base 12: mod_base = OTHER; note = cytidine
  modified_base 13: mod_base = OTHER; note = cytidine
  modified_base 14: mod_base = OTHER; note = cytidine
  modified_base 15: mod_base = OTHER; note = uridine
  modified_base 16: mod_base = OTHER; note = cytidine
  modified_base 17: mod_base = OTHER; note = cytidine
  modified_base 18: mod_base = OTHER; note = cytidine
  modified_base 19: mod_base = OTHER; note = cytidine
  modified_base 20: mod_base = OTHER; note = 2'-deoxythymidine
  modified_base 21: mod_base = OTHER; note = 2'-deoxythymidine
  source 1..21: mol_type = other DNA
cacaaagaaagccctcccctt

SEQ ID NO: 1345 - DNA, 21 bp, synthetic construct
  modified_base 1: mod_base = OTHER; note = adenosine
  modified_base 2: mod_base = cm
  modified_base 3: mod_base = OTHER; note = adenosine
  modified_base 4: mod_base = cm
  modified_base 5: mod_base = OTHER; note = adenosine
  modified_base 6: mod_base = OTHER; note = adenosine
  modified_base 7: mod_base = OTHER; note = adenosine
  modified_base 8: mod_base = OTHER; note = guanosine
  modified_base 9: mod_base = OTHER; note = adenosine
  modified_base 10: mod_base = OTHER; note = adenosine
  modified_base 11: mod_base = OTHER; note = adenosine
  modified_base 12: mod_base = OTHER; note = guanosine
  modified_base 13: mod_base = OTHER; note = cytidine
  modified_base 14: mod_base = OTHER; note = cytidine
  modified_base 15: mod_base = OTHER; note = cytidine
  modified_base 16: mod_base = OTHER; note = uridine
  modified_base 17: mod_base = OTHER; note = cytidine
  modified_base 18: mod_base = OTHER; note = cytidine
  modified_base 19: mod_base = OTHER; note = cytidine
  modified_base 20: mod_base = OTHER; note = 2'-deoxythymidine
  modified_base 21: mod_base = OTHER; note = 2'-deoxythymidine
  source 1..21: mol_type = other DNA
acacaaagaaagccctccctt

SEQ ID NO: 1346 - RNA, 21 nt, synthetic construct
  modified_base 20..21: mod_base = OTHER; note = thymine
  modified_base 1: mod_base = um
  modified_base 2: mod_base = OTHER; note = adenosine
  modified_base 3: mod_base = cm
  modified_base 4: mod_base = OTHER; note = adenosine
  modified_base 5: mod_base = cm
  modified_base 6: mod_base = OTHER; note = adenosine
  modified_base 7: mod_base = OTHER; note = adenosine
  modified_base 8: mod_base = OTHER; note = adenosine
  modified_base 9: mod_base = OTHER; note = guanosine
  modified_base 10: mod_base = OTHER; note = adenosine
  modified_base 11: mod_base = OTHER; note = adenosine
  modified_base 12: mod_base = OTHER; note = adenosine
  modified_base 13: mod_base = OTHER; note = guanosine
  modified_base 14: mod_base = OTHER; note = cytidine
  modified_base 15: mod_base = OTHER; note = cytidine
  modified_base 16: mod_base = OTHER; note = cytidine
  modified_base 17: mod_base = OTHER; note = uridine
  modified_base 18: mod_base = OTHER; note = cytidine
  modified_base 19: mod_base = OTHER; note = cytidine
  modified_base 20: mod_base = OTHER; note = 2'-deoxythymidine
  modified_base 21: mod_base = OTHER; note = 2'-deoxythymidine
  source 1..21: mol_type = other RNA
tacacaaagaaagccctcctt

SEQ ID NO: 1347 - RNA, 21 nt, synthetic construct
  modified_base 20..21: mod_base = OTHER; note = thymine
  modified_base 1: mod_base = OTHER; note = adenosine
  modified_base 2: mod_base = um
  modified_base 3: mod_base = OTHER; note = adenosine
  modified_base 4: mod_base = cm
  modified_base 5: mod_base = OTHER; note = adenosine
  modified_base 6: mod_base = cm
  modified_base 7: mod_base = OTHER; note = adenosine
  modified_base 8: mod_base = OTHER; note = adenosine
  modified_base 9: mod_base = OTHER; note = adenosine
  modified_base 10: mod_base = OTHER; note = guanosine
  modified_base 11: mod_base = OTHER; note = adenosine
  modified_base 12: mod_base = OTHER; note = adenosine
  modified_base 13: mod_base = OTHER; note = adenosine
  modified_base 14: mod_base = OTHER; note = guanosine
  modified_base 15: mod_base = OTHER; note = cytidine
  modified_base 16: mod_base = OTHER; note = cytidine
  modified_base 17: mod_base = OTHER; note = cytidine
  modified_base 18: mod_base = OTHER; note = uridine
  modified_base 19: mod_base = OTHER; note = cytidine
  modified_base 20: mod_base = OTHER; note = 2'-deoxythymidine
  modified_base 21: mod_base = OTHER; note = 2'-deoxythymidine
  source 1..21: mol_type = other RNA
atacacaaagaaagccctctt

SEQ ID NO: 1348 - RNA, 21 nt, synthetic construct
  modified_base 20..21: mod_base = OTHER; note = thymine
  modified_base 1: mod_base = OTHER; note = adenosine
  modified_base 2: mod_base = OTHER; note = adenosine
  modified_base 3: mod_base = um
  modified_base 4: mod_base = OTHER; note = adenosine
  modified_base 5: mod_base = cm
  modified_base 6: mod_base = OTHER; note = adenosine
  modified_base 7: mod_base = cm
  modified_base 8: mod_base = OTHER; note = adenosine
  modified_base 9: mod_base = OTHER; note = adenosine
  modified_base 10: mod_base = OTHER; note = adenosine
  modified_base 11: mod_base = OTHER; note = guanosine
  modified_base 12: mod_base = OTHER; note = adenosine
  modified_base 13: mod_base = OTHER; note = adenosine
  modified_base 14: mod_base = OTHER; note = adenosine
  modified_base 15: mod_base = OTHER; note = guanosine
  modified_base 16: mod_base = OTHER; note = cytidine
  modified_base 17: mod_base = OTHER; note = cytidine
  modified_base 18: mod_base = OTHER; note = cytidine
  modified_base 19: mod_base = OTHER; note = uridine
  modified_base 20: mod_base = OTHER; note = 2'-deoxythymidine
  modified_base 21: mod_base = OTHER; note = 2'-deoxythymidine
  source 1..21: mol_type = other RNA
aatacacaaagaaagcccttt

SEQ ID NO: 1349 - RNA, 21 nt, synthetic construct
  modified_base 20..21: mod_base = OTHER; note = thymine
  modified_base 1: mod_base = OTHER; note = adenosine
  modified_base 2: mod_base = OTHER; note = adenosine
  modified_base 3: mod_base = OTHER; note = adenosine
  modified_base 4: mod_base = um
  modified_base 5: mod_base = OTHER; note = adenosine
  modified_base 6: mod_base = cm
  modified_base 7: mod_base = OTHER; note = adenosine
  modified_base 8: mod_base = cm
  modified_base 9: mod_base = OTHER; note = adenosine
  modified_base 10: mod_base = OTHER; note = adenosine
  modified_base 11: mod_base = OTHER; note = adenosine
  modified_base 12: mod_base = OTHER; note = guanosine
  modified_base 13: mod_base = OTHER; note = adenosine
  modified_base 14: mod_base = OTHER; note = adenosine
  modified_base 15: mod_base = OTHER; note = adenosine
  modified_base 16: mod_base = OTHER; note = guanosine
  modified_base 17: mod_base = OTHER; note = cytidine
  modified_base 18: mod_base = OTHER; note = cytidine
  modified_base 19: mod_base = OTHER; note = cytidine
  modified_base 20: mod_base = OTHER; note = 2'-deoxythymidine
  modified_base 21: mod_base = OTHER; note = 2'-deoxythymidine
  source 1..21: mol_type = other RNA
aaatacacaaagaaagccctt

SEQ ID NO: 1350 - RNA, 21 nt, synthetic construct
  modified_base 20..21: mod_base = OTHER; note = thymine
  modified_base 1: mod_base = cm
  modified_base 2: mod_base = OTHER; note = adenosine
  modified_base 3: mod_base = OTHER; note = adenosine
  modified_base 4: mod_base = OTHER; note = adenosine
  modified_base 5: mod_base = um
  modified_base 6: mod_base = OTHER; note = adenosine
  modified_base 7: mod_base = cm
  modified_base 8: mod_base = OTHER; note = adenosine
  modified_base 9: mod_base = cm
  modified_base 10: mod_base = OTHER; note = adenosine
  modified_base 11: mod_base = OTHER; note = adenosine
  modified_base 12: mod_base = OTHER; note = adenosine
  modified_base 13: mod_base = OTHER; note = guanosine
  modified_base 14: mod_base = OTHER; note = adenosine
  modified_base 15: mod_base = OTHER; note = adenosine
  modified_base 16: mod_base = OTHER; note = adenosine
  modified_base 17: mod_base = OTHER; note = guanosine
  modified_base 18: mod_base = OTHER; note = cytidine
  modified_base 19: mod_base = OTHER; note = cytidine
  modified_base 20: mod_base = OTHER; note = 2'-deoxythymidine
  modified_base 21: mod_base = OTHER; note = 2'-deoxythymidine
  source 1..21: mol_type = other RNA
caaatacacaaagaaagcctt

SEQ ID NO: 1351 - RNA, 21 nt, synthetic construct
  modified_base 20..21: mod_base = OTHER; note = thymine
  modified_base 1: mod_base = OTHER; note = guanosine
  modified_base 2: mod_base = cm
  modified_base 3: mod_base = OTHER; note = adenosine
  modified_base 4: mod_base = OTHER; note = adenosine
  modified_base 5: mod_base = OTHER; note = adenosine
  modified_base 6: mod_base = um
  modified_base 7: mod_base = OTHER; note = adenosine
  modified_base 8: mod_base = cm
  modified_base 9: mod_base = OTHER; note = adenosine
  modified_base 10: mod_base = cm
  modified_base 11: mod_base = OTHER; note = adenosine
  modified_base 12: mod_base = OTHER; note = adenosine
  modified_base 13: mod_base = OTHER; note = adenosine
  modified_base 14: mod_base = OTHER; note = guanosine
  modified_base 15: mod_base = OTHER; note = adenosine
  modified_base 16: mod_base = OTHER; note = adenosine
  modified_base 17: mod_base = OTHER; note = adenosine
  modified_base 18: mod_base = OTHER; note = guanosine
  modified_base 19: mod_base = OTHER; note = cytidine
  modified_base 20: mod_base = OTHER; note = 2'-deoxythymidine
  modified_base 21: mod_base = OTHER; note = 2'-deoxythymidine
  source 1..21: mol_type = other RNA
gcaaatacacaaagaaagctt

SEQ ID NO: 1352 - RNA, 21 nt, synthetic construct
  modified_base 20..21: mod_base = OTHER; note = thymine
  modified_base 1: mod_base = OTHER; note = guanosine
  modified_base 2: mod_base = OTHER; note = guanosine
  modified_base 3: mod_base = cm
  modified_base 4: mod_base = OTHER; note = adenosine
  modified_base 5: mod_base = OTHER; note = adenosine
  modified_base 6: mod_base = OTHER; note = adenosine
  modified_base 7: mod_base = um
  modified_base 8: mod_base = OTHER; note = adenosine
  modified_base 9: mod_base = cm
  modified_base 10: mod_base = OTHER; note = adenosine
  modified_base 11: mod_base = cm
  modified_base 12: mod_base = OTHER; note = adenosine
  modified_base 13: mod_base = OTHER; note = adenosine
  modified_base 14: mod_base = OTHER; note = adenosine
  modified_base 15: mod_base = OTHER; note = guanosine
  modified_base 16: mod_base = OTHER; note = adenosine
  modified_base 17: mod_base = OTHER; note = adenosine
  modified_base 18: mod_base = OTHER; note = adenosine
  modified_base 19: mod_base = OTHER; note = guanosine
  modified_base 20: mod_base = OTHER; note = 2'-deoxythymidine
  modified_base 21: mod_base = OTHER; note = 2'-deoxythymidine
  source 1..21: mol_type = other RNA
ggcaaatacacaaagaaagtt

SEQ ID NO: 1353 - RNA, 21 nt, synthetic construct
  modified_base 20..21: mod_base = OTHER; note = thymine
  modified_base 1: mod_base = OTHER; note = uridine
  modified_base 2: mod_base = OTHER; note = guanosine
  modified_base 3: mod_base = OTHER; note = guanosine
  modified_base 4: mod_base = cm
  modified_base 5: mod_base = OTHER; note = adenosine
  modified_base 6: mod_base = OTHER; note = adenosine
  modified_base 7: mod_base = OTHER; note = adenosine
  modified_base 8: mod_base = um
  modified_base 9: mod_base = OTHER; note = adenosine
  modified_base 10: mod_base = cm
  modified_base 11: mod_base = OTHER; note = adenosine
  modified_base 12: mod_base = cm
  modified_base 13: mod_base = OTHER; note = adenosine
  modified_base 14: mod_base = OTHER; note = adenosine
  modified_base 15: mod_base = OTHER; note = adenosine
  modified_base 16: mod_base = OTHER; note = guanosine
  modified_base 17: mod_base = OTHER; note = adenosine
  modified_base 18: mod_base = OTHER; note = adenosine
  modified_base 19: mod_base = OTHER; note = adenosine
  modified_base 20: mod_base = OTHER; note = 2'-deoxythymidine
  modified_base 21: mod_base = OTHER; note = 2'-deoxythymidine
  source 1..21: mol_type = other RNA
tggcaaatacacaaagaaatt

SEQ ID NO: 1354 - RNA, 21 nt, synthetic construct
  modified_base 20..21: mod_base = OTHER; note = thymine
  modified_base 1: mod_base = OTHER; note = adenosine
  modified_base 2: mod_base = OTHER; note = uridine
  modified_base 3: mod_base = OTHER; note = guanosine
  modified_base 4: mod_base = OTHER; note = guanosine
  modified_base 5: mod_base = cm
  modified_base 6: mod_base = OTHER; note = adenosine
  modified_base 7: mod_base = OTHER; note = adenosine
  modified_base 8: mod_base = OTHER; note = adenosine
  modified_base 9: mod_base = um
  modified_base 10: mod_base = OTHER; note = adenosine
  modified_base 11: mod_base = cm
  modified_base 12: mod_base = OTHER; note = adenosine
  modified_base 13: mod_base = cm
  modified_base 14: mod_base = OTHER; note = adenosine
  modified_base 15: mod_base = OTHER; note = adenosine
  modified_base 16: mod_base = OTHER; note = adenosine
  modified_base 17: mod_base = OTHER; note = guanosine
  modified_base 18: mod_base = OTHER; note = adenosine
  modified_base 19: mod_base = OTHER; note = adenosine
  modified_base 20: mod_base = OTHER; note = 2'-deoxythymidine
  modified_base 21: mod_base = OTHER; note = 2'-deoxythymidine
  source 1..21: mol_type = other RNA
atggcaaatacacaaagaatt

SEQ ID NO: 1355 - RNA, 21 nt, synthetic construct
  modified_base 20..21: mod_base = OTHER; note = thymine
  modified_base 1: mod_base = um
  modified_base 2: mod_base = OTHER; note = adenosine
  modified_base 3: mod_base = OTHER; note = uridine
  modified_base 4: mod_base = OTHER; note = guanosine
  modified_base 5: mod_base = OTHER; note = guanosine
  modified_base 6: mod_base = cm
  modified_base 7: mod_base = OTHER; note = adenosine
  modified_base 8: mod_base = OTHER; note = adenosine
  modified_base 9: mod_base = OTHER; note = adenosine
  modified_base 10: mod_base = um
  modified_base 11: mod_base = OTHER; note = adenosine
  modified_base 12: mod_base = cm
  modified_base 13: mod_base = OTHER; note = adenosine
  modified_base 14: mod_base = cm
  modified_base 15: mod_base = OTHER; note = adenosine
  modified_base 16: mod_base = OTHER; note = adenosine
  modified_base 17: mod_base = OTHER; note = adenosine
  modified_base 18: mod_base = OTHER; note = guanosine
  modified_base 19: mod_base = OTHER; note = adenosine
  modified_base 20: mod_base = OTHER; note = 2'-deoxythymidine
  modified_base 21: mod_base = OTHER; note = 2'-deoxythymidine
  source 1..21: mol_type = other RNA
tatggcaaatacacaaagatt

SEQ ID NO: 1356 - RNA, 21 nt, synthetic construct
  modified_base 20..21: mod_base = OTHER; note = thymine
  modified_base 1: mod_base = OTHER; note = uridine
  modified_base 2: mod_base = um
  modified_base 3: mod_base = OTHER; note = adenosine
  modified_base 4: mod_base = OTHER; note = uridine
  modified_base 5: mod_base = OTHER; note = guanosine
  modified_base 6: mod_base = OTHER; note = guanosine
  modified_base 7: mod_base = cm
  modified_base 8: mod_base = OTHER; note = adenosine
  modified_base 9: mod_base = OTHER; note = adenosine
  modified_base 10: mod_base = OTHER; note = adenosine
  modified_base 11: mod_base = um
  modified_base 12: mod_base = OTHER; note = adenosine
  modified_base 13: mod_base = cm
  modified_base 14: mod_base = OTHER; note = adenosine
  modified_base 15: mod_base = cm
  modified_base 16: mod_base = OTHER; note = adenosine
  modified_base 17: mod_base = OTHER; note = adenosine
  modified_base 18: mod_base = OTHER; note = adenosine
  modified_base 19: mod_base = OTHER; note = guanosine
  modified_base 20: mod_base = OTHER; note = 2'-deoxythymidine
  modified_base 21: mod_base = OTHER; note = 2'-deoxythymidine
  source 1..21: mol_type = other RNA
ttatggcaaatacacaaagtt

SEQ ID NO: 1357 - RNA, 21 nt, synthetic construct
  modified_base 20..21: mod_base = OTHER; note = thymine
  modified_base 1: mod_base = OTHER; note = uridine
  modified_base 2: mod_base = OTHER; note = uridine
  modified_base 3: mod_base = um
  modified_base 4: mod_base = OTHER; note = adenosine
  modified_base 5: mod_base = OTHER; note = uridine
  modified_base 6: mod_base = OTHER; note = guanosine
  modified_base 7: mod_base = OTHER; note = guanosine
  modified_base 8: mod_base = cm
  modified_base 9: mod_base = OTHER; note = adenosine
  modified_base 10: mod_base = OTHER; note = adenosine
  modified_base 11: mod_base = OTHER; note = adenosine
  modified_base 12: mod_base = um
  modified_base 13: mod_base = OTHER; note = adenosine
  modified_base 14: mod_base = cm
  modified_base 15: mod_base = OTHER; note = adenosine
  modified_base 16: mod_base = cm
  modified_base 17: mod_base = OTHER; note = adenosine
  modified_base 18: mod_base = OTHER; note = adenosine
  modified_base 19: mod_base = OTHER; note = adenosine
  modified_base 20: mod_base = OTHER; note = 2'-deoxythymidine
  modified_base 21: mod_base = OTHER; note = 2'-deoxythymidine
  source 1..21: mol_type = other RNA
tttatggcaaatacacaaatt

SEQ ID NO: 1358 - RNA, 21 nt, synthetic construct
  modified_base 20..21: mod_base = OTHER; note = thymine
  modified_base 1: mod_base = OTHER; note = adenosine
  modified_base 2: mod_base = OTHER; note = uridine
  modified_base 3: mod_base = OTHER; note = uridine
  modified_base 4: mod_base = um
  modified_base 5: mod_base = OTHER; note = adenosine
  modified_base 6: mod_base = OTHER; note = uridine
  modified_base 7: mod_base = OTHER; note = guanosine
  modified_base 8: mod_base = OTHER; note = guanosine
  modified_base 9: mod_base = cm
  modified_base 10: mod_base = OTHER; note = adenosine
  modified_base 11: mod_base = OTHER; note = adenosine
  modified_base 12: mod_base = OTHER; note = adenosine
  modified_base 13: mod_base = um
  modified_base 14: mod_base = OTHER; note = adenosine
  modified_base 15: mod_base = cm
  modified_base 16: mod_base = OTHER; note = adenosine
  modified_base 17: mod_base = cm
  modified_base 18: mod_base = OTHER; note = adenosine
  modified_base 19: mod_base = OTHER; note = adenosine
  modified_base 20: mod_base = OTHER; note = 2'-deoxythymidine
  modified_base 21: mod_base = OTHER; note = 2'-deoxythymidine
  source 1..21: mol_type = other RNA
atttatggcaaatacacaatt

SEQ ID NO: 1359 - RNA, 21 nt, synthetic construct
  modified_base 20..21: mod_base = OTHER; note = thymine
  modified_base 1: mod_base = um
  modified_base 2: mod_base = OTHER; note = adenosine
  modified_base 3: mod_base = OTHER; note = uridine
  modified_base 4: mod_base = OTHER; note = uridine
  modified_base 5: mod_base = um
  modified_base 6: mod_base = OTHER; note = adenosine
  modified_base 7: mod_base = OTHER; note = uridine
  modified_base 8: mod_base = OTHER; note = guanosine
  modified_base 9: mod_base = OTHER; note = guanosine
  modified_base 10: mod_base = cm
  modified_base 11: mod_base = OTHER; note = adenosine
  modified_base 12: mod_base = OTHER; note = adenosine
  modified_base 13: mod_base = OTHER; note = adenosine
  modified_base 14: mod_base = um
  modified_base 15: mod_base = OTHER; note = adenosine
  modified_base 16: mod_base = cm
  modified_base 17: mod_base = OTHER; note = adenosine
  modified_base 18: mod_base = cm
  modified_base 19: mod_base = OTHER; note = adenosine
  modified_base 20: mod_base = OTHER; note = 2'-deoxythymidine
  modified_base 21: mod_base = OTHER; note = 2'-deoxythymidine
  source 1..21: mol_type = other RNA
tatttatggcaaatacacatt

SEQ ID NO: 1360 - RNA, 21 nt, synthetic construct
  modified_base 20..21: mod_base = OTHER; note = thymine
  modified_base 1: mod_base = OTHER; note = uridine
  modified_base 2: mod_base = um
  modified_base 3: mod_base = OTHER; note = adenosine
  modified_base 4: mod_base = OTHER; note = uridine
  modified_base 5: mod_base = OTHER; note = uridine
  modified_base 6: mod_base = um
  modified_base 7: mod_base = OTHER; note = adenosine
  modified_base 8: mod_base = OTHER; note = uridine
  modified_base 9: mod_base = OTHER; note = guanosine
  modified_base 10: mod_base = OTHER; note = guanosine
  modified_base 11: mod_base = cm
  modified_base 12: mod_base = OTHER; note = adenosine
  modified_base 13: mod_base = OTHER; note = adenosine
  modified_base 14: mod_base = OTHER; note = adenosine
  modified_base 15: mod_base = um
  modified_base 16: mod_base = OTHER; note = adenosine
  modified_base 17: mod_base = cm
  modified_base 18: mod_base = OTHER; note = adenosine
  modified_base 19: mod_base = OTHER; note = cytidine
  modified_base 20: mod_base = OTHER; note = 2'-deoxythymidine
  modified_base 21: mod_base = OTHER; note = 2'-deoxythymidine
  source 1..21: mol_type = other RNA
ttatttatggcaaatacactt

SEQ ID NO: 1361 - RNA, 21 nt, synthetic construct
  modified_base 20..21: mod_base = OTHER; note = thymine
  modified_base 1: mod_base = OTHER; note = adenosine
  modified_base 2: mod_base = OTHER; note = uridine
  modified_base 3: mod_base = um
  modified_base 4: mod_base = OTHER; note = adenosine
  modified_base 5: mod_base = OTHER; note = uridine
  modified_base 6: mod_base = OTHER; note = uridine
  modified_base 7: mod_base = um
  modified_base 8: mod_base = OTHER; note = adenosine
  modified_base 9: mod_base = OTHER; note = uridine
  modified_base 10: mod_base = OTHER; note = guanosine
  modified_base 11: mod_base = OTHER; note = guanosine
  modified_base 12: mod_base = cm
  modified_base 13: mod_base = OTHER; note = adenosine
  modified_base 14: mod_base = OTHER; note = adenosine
  modified_base 15: mod_base = OTHER; note = adenosine
  modified_base 16: mod_base = um
  modified_base 17: mod_base = OTHER; note = adenosine
  modified_base 18: mod_base = cm
  modified_base 19: mod_base = OTHER; note = adenosine
  modified_base 20: mod_base = OTHER; note = 2'-deoxythymidine
  modified_base 21: mod_base = OTHER; note = 2'-deoxythymidine
  source 1..21: mol_type = other RNA
attatttatggcaaatacatt

SEQ ID NO: 1362 - RNA, 21 nt, synthetic construct
  modified_base 20..21: mod_base = OTHER; note = thymine
  modified_base 1: mod_base = um
  modified_base 2: mod_base = OTHER; note = adenosine
  modified_base 3: mod_base = OTHER; note = uridine
  modified_base 4: mod_base = um
  modified_base 5: mod_base = OTHER; note = adenosine
  modified_base 6: mod_base = OTHER; note = uridine
  modified_base 7: mod_base = OTHER; note = uridine
  modified_base 8: mod_base = um
  modified_base 9: mod_base = OTHER; note = adenosine
  modified_base 10: mod_base = OTHER; note = uridine
  modified_base 11: mod_base = OTHER; note = guanosine
  modified_base 12: mod_base = OTHER; note = guanosine
  modified_base 13: mod_base = cm
  modified_base 14: mod_base = OTHER; note = adenosine
  modified_base 15: mod_base = OTHER; note = adenosine
  modified_base 16: mod_base = OTHER; note = adenosine
  modified_base 17: mod_base = um
  modified_base 18: mod_base = OTHER; note = adenosine
  modified_base 19: mod_base = OTHER; note = cytidine
  modified_base 20: mod_base = OTHER; note = 2'-deoxythymidine
  modified_base 21: mod_base = OTHER; note = 2'-deoxythymidine
  source 1..21: mol_type = other RNA
tattatttatggcaaatactt

SEQ ID NO: 1363 - RNA, 21 nt, synthetic construct
  modified_base 20..21: mod_base = OTHER; note = thymine
  modified_base 1: mod_base = OTHER; note = guanosine
  modified_base 2: mod_base = um
  modified_base 3: mod_base = OTHER; note = adenosine
  modified_base 4: mod_base = OTHER; note = uridine
  modified_base 5: mod_base = um
  modified_base 6: mod_base = OTHER; note = adenosine
  modified_base 7: mod_base = OTHER; note = uridine
  modified_base 8: mod_base = OTHER; note = uridine
  modified_base 9: mod_base = um
  modified_base 10: mod_base = OTHER; note = adenosine
  modified_base 11: mod_base = OTHER; note = uridine
  modified_base 12: mod_base = OTHER; note = guanosine
  modified_base 13: mod_base = OTHER; note = guanosine
  modified_base 14: mod_base = cm
  modified_base 15: mod_base = OTHER; note = adenosine
  modified_base 16: mod_base = OTHER; note = adenosine
  modified_base 17: mod_base = OTHER; note = adenosine
  modified_base 18: mod_base = um
  modified_base 19: mod_base = OTHER; note = adenosine
  modified_base 20: mod_base = OTHER; note = 2'-deoxythymidine
  modified_base 21: mod_base = OTHER; note = 2'-deoxythymidine
  source 1..21: mol_type = other RNA
gtattatttatggcaaatatt

SEQ ID NO: 1364 - RNA, 21 nt, synthetic construct
  modified_base 20..21: mod_base = OTHER; note = thymine
  modified_base 1: mod_base = OTHER; note = adenosine
  modified_base 2: mod_base = OTHER; note = guanosine
  modified_base 3: mod_base = um
  modified_base 4: mod_base = OTHER; note = adenosine
  modified_base 5: mod_base = OTHER; note = uridine
  modified_base 6: mod_base = um
  modified_base 7: mod_base = OTHER; note = adenosine
  modified_base 8: mod_base = OTHER; note = uridine
  modified_base 9: mod_base = OTHER; note = uridine
  modified_base 10: mod_base = um
  modified_base 11: mod_base = OTHER; note = adenosine
  modified_base 12: mod_base = OTHER; note = uridine
  modified_base 13: mod_base = OTHER; note = guanosine
  modified_base 14: mod_base = OTHER; note = guanosine
  modified_base 15: mod_base = cm
  modified_base 16: mod_base = OTHER; note = adenosine
  modified_base 17: mod_base = OTHER; note = adenosine
  modified_base 18: mod_base = OTHER; note = adenosine
  modified_base 19: mod_base = OTHER; note = uridine
  modified_base 20: mod_base = OTHER; note = 2'-deoxythymidine
  modified_base 21: mod_base = OTHER; note = 2'-deoxythymidine
  source 1..21: mol_type = other RNA
agtattatttatggcaaattt

SEQ ID NO: 1365 - RNA, 21 nt, synthetic construct
  modified_base 20..21: mod_base = OTHER; note = thymine
  modified_base 1: mod_base = um
  modified_base 2: mod_base = OTHER; note = adenosine
  modified_base 3: mod_base = OTHER; note = guanosine
  modified_base 4: mod_base = um
  modified_base 5: mod_base = OTHER; note = adenosine
  modified_base 6: mod_base = OTHER; note = uridine
  modified_base 7: mod_base = um
  modified_base 8: mod_base = OTHER; note = adenosine
  modified_base 9: mod_base = OTHER; note = uridine
  modified_base 10: mod_base = OTHER; note = uridine
  modified_base 11: mod_base = um
  modified_base 12: mod_base = OTHER; note = adenosine
  modified_base 13: mod_base = OTHER; note = uridine
  modified_base 14: mod_base = OTHER; note = guanosine
  modified_base 15: mod_base = OTHER; note = guanosine
  modified_base 16: mod_base = cm
  modified_base 17: mod_base = OTHER; note = adenosine
  modified_base 18: mod_base = OTHER; note = adenosine
  modified_base 19: mod_base = OTHER; note = adenosine
  modified_base 20: mod_base = OTHER; note = 2'-deoxythymidine
  modified_base 21: mod_base = OTHER; note = 2'-deoxythymidine
  source 1..21: mol_type = other RNA
tagtattatttatggcaaatt

SEQ ID NO: 1366 - RNA, 21 nt, synthetic construct
  modified_base 20..21: mod_base = OTHER; note = thymine
  modified_base 1: mod_base = OTHER; note = adenosine
  modified_base 2: mod_base = um
  modified_base 3: mod_base = OTHER; note = adenosine
  modified_base 4: mod_base = OTHER; note = adenosine
  modified_base 5: mod_base = OTHER; note = uridine
  modified_base 6: mod_base = OTHER; note = guanosine
  modified_base 7: mod_base = OTHER; note = guanosine
  modified_base 8: mod_base = OTHER; note = uridine
  modified_base 9: mod_base = OTHER; note = guanosine
  modified_base 10: mod_base = OTHER; note = adenosine
  modified_base 11: mod_base = OTHER; note = adenosine
  modified_base 12: mod_base = um
  modified_base 13: mod_base = OTHER; note = adenosine
  modified_base 14: mod_base = OTHER; note = uridine
  modified_base 15: mod_base = OTHER; note = cytidine
  modified_base 16: mod_base = OTHER; note = uridine
  modified_base 17: mod_base = OTHER; note = uridine
  modified_base 18: mod_base = cm
  modified_base 19: mod_base = OTHER; note = adenosine
  modified_base 20: mod_base = OTHER; note = 2'-deoxythymidine
  modified_base 21: mod_base = OTHER; note = 2'-deoxythymidine
  source 1..21: mol_type = other RNA
ataatggtgaatatcttcatt

SEQ ID NO: 1367 - RNA, 21 nt, synthetic construct
  modified_base 20..21: mod_base = OTHER; note = thymine
  modified_base 1: mod_base = um
  modified_base 2: mod_base = OTHER; note = adenosine
  modified_base 3: mod_base = um
  modified_base 4: mod_base = OTHER; note = adenosine
  modified_base 5: mod_base = OTHER; note = adenosine
  modified_base 6: mod_base = OTHER; note = uridine
  modified_base 7: mod_base = OTHER; note = guanosine
  modified_base 8: mod_base = OTHER; note = guanosine
  modified_base 9: mod_base = OTHER; note = uridine
  modified_base 10: mod_base = OTHER; note = guanosine
  modified_base 11: mod_base = OTHER; note = adenosine
  modified_base 12: mod_base = OTHER; note = adenosine
  modified_base 13: mod_base = um
  modified_base 14: mod_base = OTHER; note = adenosine
  modified_base 15: mod_base = OTHER; note = uridine
  modified_base 16: mod_base = OTHER; note = cytidine
  modified_base 17: mod_base = OTHER; note = uridine
  modified_base 18: mod_base = OTHER; note = uridine
  modified_base 19: mod_base = OTHER; note = cytidine
  modified_base 20: mod_base = OTHER; note = 2'-deoxythymidine
  modified_base 21: mod_base = OTHER; note = 2'-deoxythymidine
  source 1..21: mol_type = other RNA
tataatggtgaatatcttctt

SEQ ID NO: 1368 - RNA, 21 nt, synthetic construct
  modified_base 20..21: mod_base = OTHER; note = thymine
  modified_base 1: mod_base = OTHER; note = uridine
  modified_base 2: mod_base = OTHER; note = cytidine
  modified_base 3: mod_base = um
  modified_base 4: mod_base = OTHER; note = adenosine
  modified_base 5: mod_base = um
  modified_base 6: mod_base = OTHER; note = adenosine
  modified_base 7: mod_base = OTHER; note = adenosine
  modified_base 8: mod_base = OTHER; note = uridine
  modified_base 9: mod_base = OTHER; note = guanosine
  modified_base 10: mod_base = OTHER; note = guanosine
  modified_base 11: mod_base = OTHER; note = uridine
  modified_base 12: mod_base = OTHER; note = guanosine
  modified_base 13: mod_base = OTHER; note = adenosine
  modified_base 14: mod_base = OTHER; note = adenosine
  modified_base 15: mod_base = um
  modified_base 16: mod_base = OTHER; note = adenosine
  modified_base 17: mod_base = OTHER; note = uridine
  modified_base 18: mod_base = OTHER; note = cytidine
  modified_base 19: mod_base = OTHER; note = uridine
  modified_base 20: mod_base = OTHER; note = 2'-deoxythymidine
  modified_base 21: mod_base = OTHER; note = 2'-deoxythymidine
  source 1..21: mol_type = other RNA
tctataatggtgaatatcttt

SEQ ID NO: 1369 - DNA, 21 bp, synthetic construct
  modified_base 1: mod_base = OTHER; note = cytidine
  modified_base 2: mod_base = OTHER; note = uridine
  modified_base 3: mod_base = OTHER; note = uridine
  modified_base 4: mod_base = OTHER; note = guanosine
  modified_base 5: mod_base = OTHER; note = uridine
  modified_base 6: mod_base = OTHER; note = cytidine
  modified_base 7: mod_base = OTHER; note = uridine
  modified_base 8: mod_base = OTHER; note = uridine
  modified_base 9: mod_base = OTHER; note = uridine
  modified_base 10: mod_base = OTHER; note = guanosine
  modified_base 11: mod_base = OTHER; note = cytidine
  modified_base 12: mod_base = OTHER; note = uridine
  modified_base 13: mod_base = OTHER; note = guanosine
  modified_base 14: mod_base = OTHER; note = adenosine
  modified_base 15: mod_base = OTHER; note = uridine
  modified_base 16: mod_base = OTHER; note = guanosine
  modified_base 17: mod_base = OTHER; note = uridine
  modified_base 18: mod_base = OTHER; note = uridine
  modified_base 19: mod_base = OTHER; note = uridine
  modified_base 20: mod_base = OTHER; note = 2'-deoxythymidine
  modified_base 21: mod_base = OTHER; note = 2'-deoxythymidine
  source 1..21: mol_type = other DNA
cttgtctttgctgatgttttt

SEQ ID NO: 1370 - DNA, 21 bp, synthetic construct
  modified_base 1: mod_base = OTHER; note = uridine
  modified_base 2: mod_base = OTHER; note = cytidine
  modified_base 3: mod_base = OTHER; note = uridine
  modified_base 4: mod_base = OTHER; note = uridine
  modified_base 5: mod_base = OTHER; note = guanosine
  modified_base 6: mod_base = OTHER; note = uridine
  modified_base 7: mod_base = OTHER; note = cytidine
  modified_base 8: mod_base = OTHER; note = uridine
  modified_base 9: mod_base = OTHER; note = uridine
  modified_base 10: mod_base = OTHER; note = uridine
  modified_base 11: mod_base = OTHER; note = guanosine
  modified_base 12: mod_base = OTHER; note = cytidine
  modified_base 13: mod_base = OTHER; note = uridine
  modified_base 14: mod_base = OTHER; note = guanosine
  modified_base 15: mod_base = OTHER; note = adenosine
  modified_base 16: mod_base = OTHER; note = uridine
  modified_base 17: mod_base = OTHER; note = guanosine
  modified_base 18: mod_base = OTHER; note = uridine
  modified_base 19: mod_base = OTHER; note = uridine
  modified_base 20: mod_base = OTHER; note = 2'-deoxythymidine
  modified_base 21: mod_base = OTHER; note = 2'-deoxythymidine
  source 1..21: mol_type = other DNA
tcttgtctttgctgatgtttt

SEQ ID NO: 1371 - DNA, 21 bp, synthetic construct
  modified_base 1: mod_base = OTHER; note = guanosine
  modified_base 2: mod_base = OTHER; note = uridine
  modified_base 3: mod_base = OTHER; note = cytidine
  modified_base 4: mod_base = OTHER; note = uridine
  modified_base 5: mod_base = OTHER; note = uridine
  modified_base 6: mod_base = OTHER; note = guanosine
  modified_base 7: mod_base = OTHER; note = uridine
  modified_base 8: mod_base = OTHER; note = cytidine
  modified_base 9: mod_base = OTHER; note = uridine
  modified_base 10: mod_base = OTHER; note = uridine
  modified_base 11: mod_base = OTHER; note = uridine
  modified_base 12: mod_base = OTHER; note = guanosine
  modified_base 13: mod_base = OTHER; note = cytidine
  modified_base 14: mod_base = OTHER; note = uridine
  modified_base 15: mod_base = OTHER; note = guanosine
  modified_base 16: mod_base = OTHER; note = adenosine
  modified_base 17: mod_base = OTHER; note = uridine
  modified_base 18: mod_base = OTHER; note = guanosine
  modified_base 19: mod_base = OTHER; note = uridine
  modified_base 20: mod_base = OTHER; note = 2'-deoxythymidine
  modified_base 21: mod_base = OTHER; note = 2'-deoxythymidine
  source 1..21: mol_type = other DNA
gtcttgtctttgctgatgttt

SEQ ID NO: 1372 - DNA, 21 bp, synthetic construct
  modified_base 1: mod_base = OTHER; note = uridine
  modified_base 2: mod_base = OTHER; note = guanosine
  modified_base 3: mod_base = OTHER; note = uridine
  modified_base 4: mod_base = OTHER; note = cytidine
  modified_base 5: mod_base = OTHER; note = uridine
  modified_base 6: mod_base = OTHER; note = uridine
  modified_base 7: mod_base = OTHER; note = guanosine
  modified_base 8: mod_base = OTHER; note = uridine
  modified_base 9: mod_base = OTHER; note = cytidine
  modified_base 10: mod_base = OTHER; note = uridine
  modified_base 11: mod_base = OTHER; note = uridine
  modified_base 12: mod_base = OTHER; note = uridine
  modified_base 13: mod_base = OTHER; note = guanosine
  modified_base 14: mod_base = OTHER; note = cytidine
  modified_base 15: mod_base = OTHER; note = uridine
  modified_base 16: mod_base = OTHER; note = guanosine
  modified_base 17: mod_base = OTHER; note = adenosine
  modified_base 18: mod_base = OTHER; note = uridine
  modified_base 19: mod_base = OTHER; note = guanosine
  modified_base 20: mod_base = OTHER; note = 2'-deoxythymidine
  modified_base 21: mod_base = OTHER; note = 2'-deoxythymidine
  source 1..21: mol_type = other DNA
tgtcttgtctttgctgatgtt

SEQ ID NO: 1373 - DNA, 21 bp, synthetic construct
  modified_base 1: mod_base = OTHER; note = cytidine
  modified_base 2: mod_base = OTHER; note = uridine
  modified_base 3: mod_base = OTHER; note = guanosine
  modified_base 4: mod_base = OTHER; note = uridine
  modified_base 5: mod_base = OTHER; note = cytidine
  modified_base 6: mod_base = OTHER; note = uridine
  modified_base 7: mod_base = OTHER; note = uridine
  modified_base 8: mod_base = OTHER; note = guanosine
  modified_base 9: mod_base = OTHER; note = uridine
  modified_base 10: mod_base = OTHER; note = cytidine
  modified_base 11: mod_base = OTHER; note = uridine
  modified_base 12: mod_base = OTHER; note = uridine
  modified_base 13: mod_base = OTHER; note = uridine
  modified_base 14: mod_base = OTHER; note = guanosine
  modified_base 15: mod_base = OTHER; note = cytidine
  modified_base 16: mod_base = OTHER; note = uridine
  modified_base 17: mod_base = OTHER; note = guanosine
  modified_base 18: mod_base = OTHER; note = adenosine
  modified_base 19: mod_base = OTHER; note = uridine
  modified_base 20: mod_base = OTHER; note = 2'-deoxythymidine
  modified_base 21: mod_base = OTHER; note = 2'-deoxythymidine
  source 1..21: mol_type = other DNA
ctgtcttgtctttgctgattt

SEQ ID NO: 1374 - RNA, 21 nt, synthetic construct
  modified_base 20..21: mod_base = OTHER; note = thymine
  modified_base 1: mod_base = OTHER; note = cytidine
  modified_base 2: mod_base = OTHER; note = uridine
  modified_base 3: mod_base = OTHER; note = guanosine
  modified_base 4: mod_base = OTHER; note = cytidine
  modified_base 5: mod_base = OTHER; note = uridine
  modified_base 6: mod_base = OTHER; note = guanosine
  modified_base 7: mod_base = OTHER; note = uridine
  modified_base 8: mod_base = OTHER; note = guanosine
  modified_base 9: mod_base = OTHER; note = uridine
  modified_base 10: mod_base = OTHER; note = cytidine
  modified_base 11: mod_base = OTHER; note = guanosine
  modified_base 12: mod_base = OTHER; note = adenosine
  modified_base 13: mod_base = OTHER; note = guanosine
  modified_base 14: mod_base = OTHER; note = adenosine
  modified_base 15: mod_base = OTHER; note = adenosine
  modified_base 16: mod_base = um
  modified_base 17: mod_base = OTHER; note = adenosine
  modified_base 18: mod_base = OTHER; note = uridine
  modified_base 19: mod_base = OTHER; note = cytidine
  modified_base 20: mod_base = OTHER; note = 2'-deoxythymidine
  modified_base 21: mod_base = OTHER; note = 2'-deoxythymidine
  source 1..21: mol_type = other RNA
ctgctgtgtcgagaatatctt

SEQ ID NO: 1375 - RNA, 21 nt, synthetic construct
  modified_base 20..21: mod_base = OTHER; note = thymine
  modified_base 1: mod_base = OTHER; note = uridine
  modified_base 2: mod_base = OTHER; note = guanosine
  modified_base 3: mod_base = OTHER; note = uridine
  modified_base 4: mod_base = OTHER; note = uridine
  modified_base 5: mod_base = OTHER; note = cytidine
  modified_base 6: mod_base = OTHER; note = uridine
  modified_base 7: mod_base = OTHER; note = cytidine
  modified_base 8: mod_base = um
  modified_base 9: mod_base = OTHER; note = adenosine
  modified_base 10: mod_base = um
  modified_base 11: mod_base = OTHER; note = adenosine
  modified_base 12: mod_base = OTHER; note = adenosine
  modified_base 13: mod_base = OTHER; note = uridine
  modified_base 14: mod_base = OTHER; note = guanosine
  modified_base 15: mod_base = OTHER; note = guanosine
  modified_base 16: mod_base = OTHER; note = uridine
  modified_base 17: mod_base = OTHER; note = guanosine
  modified_base 18: mod_base = OTHER; note = adenosine
  modified_base 19: mod_base = OTHER; note = adenosine
  modified_base 20: mod_base = OTHER; note = 2'-deoxythymidine
  modified_base 21: mod_base = OTHER; note = 2'-deoxythymidine
  source 1..21: mol_type = other RNA
tgttctctataatggtgaatt

SEQ ID NO: 1376 - RNA, 21 nt, synthetic construct
  modified_base 20..21: mod_base = OTHER; note = thymine
  modified_base 1: mod_base = OTHER; note = adenosine
  modified_base 2: mod_base = OTHER; note = cytidine
  modified_base 3: mod_base = OTHER; note = cytidine
  modified_base 4: mod_base = OTHER; note = uridine
  modified_base 5: mod_base = OTHER; note = guanosine
  modified_base 6: mod_base = OTHER; note = cytidine
  modified_base 7: mod_base = OTHER; note = uridine
  modified_base 8: mod_base = OTHER; note = guanosine
  modified_base 9: mod_base = OTHER; note = uridine
  modified_base 10: mod_base = OTHER; note = guanosine
  modified_base 11: mod_base = OTHER; note = uridine
  modified_base 12: mod_base = OTHER; note = cytidine
  modified_base 13: mod_base = OTHER; note = guanosine
  modified_base 14: mod_base = OTHER; note = adenosine
  modified_base 15: mod_base = OTHER; note = guanosine
  modified_base 16: mod_base = OTHER; note = adenosine
  modified_base 17: mod_base = OTHER; note = adenosine
  modified_base 18: mod_base = um
  modified_base 19: mod_base = OTHER; note = adenosine
  modified_base 20: mod_base = OTHER; note = 2'-deoxythymidine
  modified_base 21: mod_base = OTHER; note = 2'-deoxythymidine
  source 1..21: mol_type = other RNA
acctgctgtgtcgagaatatt

SEQ ID NO: 1377 - DNA, 21 bp, synthetic construct
  modified_base 1: mod_base = OTHER; note = uridine
  modified_base 2: mod_base = OTHER; note = guanosine
  modified_base 3: mod_base = OTHER; note = adenosine
  modified_base 4: mod_base = OTHER; note = cytidine
  modified_base 5: mod_base = OTHER; note = cytidine
  modified_base 6: mod_base = OTHER; note = uridine
  modified_base 7: mod_base = OTHER; note = guanosine
  modified_base 8: mod_base = OTHER; note = cytidine
  modified_base 9: mod_base = OTHER; note = uridine
  modified_base 10: mod_base = OTHER; note = guanosine
  modified_base 11: mod_base = OTHER; note = uridine
  modified_base 12: mod_base = OTHER; note = guanosine
  modified_base 13: mod_base = OTHER; note = uridine
  modified_base 14: mod_base = OTHER; note = cytidine
  modified_base 15: mod_base = OTHER; note = guanosine
  modified_base 16: mod_base = OTHER; note = adenosine
  modified_base 17: mod_base = OTHER; note = guanosine
  modified_base 18: mod_base = OTHER; note = adenosine
  modified_base 19: mod_base = OTHER; note = adenosine
  modified_base 20: mod_base = OTHER; note = 2'-deoxythymidine
  modified_base 21: mod_base = OTHER; note = 2'-deoxythymidine
  source 1..21: mol_type = other DNA
tgacctgctgtgtcgagaatt

SEQ ID NO: 1378 - RNA, 21 nt, synthetic construct
  modified_base 20..21: mod_base = OTHER; note = thymine
  modified_base 1: mod_base = OTHER; note = cytidine
  modified_base 2: mod_base = um
  modified_base 3: mod_base = OTHER; note = adenosine
  modified_base 4: mod_base = um
  modified_base 5: mod_base = OTHER; note = adenosine
  modified_base 6: mod_base = OTHER; note = adenosine
  modified_base 7: mod_base = OTHER; note = uridine
  modified_base 8: mod_base = OTHER; note = guanosine
  modified_base 9: mod_base = OTHER; note = guanosine
  modified_base 10: mod_base = OTHER; note = uridine
  modified_base 11: mod_base = OTHER; note = guanosine
  modified_base 12: mod_base = OTHER; note = adenosine
  modified_base 13: mod_base = OTHER; note = adenosine
  modified_base 14: mod_base = um
  modified_base 15: mod_base = OTHER; note = adenosine
  modified_base 16: mod_base = OTHER; note = uridine
  modified_base 17: mod_base = OTHER; note = cytidine
  modified_base 18: mod_base = OTHER; note = uridine
  modified_base 19: mod_base = OTHER; note = uridine
  modified_base 20: mod_base = OTHER; note = 2'-deoxythymidine
  modified_base 21: mod_base = OTHER; note = 2'-deoxythymidine
  source 1..21: mol_type = other RNA
ctataatggtgaatatctttt

SEQ ID NO: 1379 - RNA, 21 nt, synthetic construct
  modified_base 20..21: mod_base = OTHER; note = thymine
  modified_base 1: mod_base = OTHER; note = cytidine
  modified_base 2: mod_base = OTHER; note = uridine
  modified_base 3: mod_base = OTHER; note = cytidine
  modified_base 4: mod_base = um
  modified_base 5: mod_base = OTHER; note = adenosine
  modified_base 6: mod_base = um
  modified_base 7: mod_base = OTHER; note = adenosine
  modified_base 8: mod_base = OTHER; note = adenosine
  modified_base 9: mod_base = OTHER; note = uridine
  modified_base 10: mod_base = OTHER; note = guanosine
  modified_base 11: mod_base = OTHER; note = guanosine
  modified_base 12: mod_base = OTHER; note = uridine
  modified_base 13: mod_base = OTHER; note = guanosine
  modified_base 14: mod_base = OTHER; note = adenosine
  modified_base 15: mod_base = OTHER; note = adenosine
  modified_base 16: mod_base = um
  modified_base 17: mod_base = OTHER; note = adenosine
  modified_base 18: mod_base = OTHER; note = uridine
  modified_base 19: mod_base = OTHER; note = cytidine
  modified_base 20: mod_base = OTHER; note = 2'-deoxythymidine
  modified_base 21: mod_base = OTHER; note = 2'-deoxythymidine
  source 1..21: mol_type = other RNA
ctctataatggtgaatatctt

SEQ ID NO: 1380 - RNA, 21 nt, synthetic construct
  modified_base 20..21: mod_base = OTHER; note = thymine
  modified_base 1: mod_base = OTHER; note = uridine
  modified_base 2: mod_base = OTHER; note = cytidine
  modified_base 3: mod_base = OTHER; note = uridine
  modified_base 4: mod_base = OTHER; note = cytidine
  modified_base 5: mod_base = um
  modified_base 6: mod_base = OTHER; note = adenosine
  modified_base 7: mod_base = um
  modified_base 8: mod_base = OTHER; note = adenosine
  modified_base 9: mod_base = OTHER; note = adenosine
  modified_base 10: mod_base = OTHER; note = uridine
  modified_base 11: mod_base = OTHER; note = guanosine
  modified_base 12: mod_base = OTHER; note = guanosine
  modified_base 13: mod_base = OTHER; note = uridine
  modified_base 14: mod_base = OTHER; note = guanosine
  modified_base 15: mod_base = OTHER; note = adenosine
  modified_base 16: mod_base = OTHER; note = adenosine
  modified_base 17: mod_base = um
  modified_base 18: mod_base = OTHER; note = adenosine
  modified_base 19: mod_base = OTHER; note = uridine
  modified_base 20: mod_base = OTHER; note = 2'-deoxythymidine
  modified_base 21: mod_base = OTHER; note = 2'-deoxythymidine
  source 1..21: mol_type = other RNA
tctctataatggtgaatattt

SEQ ID NO: 1381 - RNA, 21 nt, synthetic construct
  modified_base 20..21: mod_base = OTHER; note = thymine
  modified_base 1: mod_base = OTHER; note = uridine
  modified_base 2: mod_base = OTHER; note = uridine
  modified_base 3: mod_base = OTHER; note = cytidine
  modified_base 4: mod_base = OTHER; note = uridine
  modified_base 5: mod_base = OTHER; note = cytidine
  modified_base 6: mod_base = um
  modified_base 7: mod_base = OTHER; note = adenosine
  modified_base 8: mod_base = um
  modified_base 9: mod_base = OTHER; note = adenosine
  modified_base 10: mod_base = OTHER; note = adenosine
  modified_base 11: mod_base = OTHER; note = uridine
  modified_base 12: mod_base = OTHER; note = guanosine
  modified_base 13: mod_base = OTHER; note = guanosine
  modified_base 14: mod_base = OTHER; note = uridine
  modified_base 15: mod_base = OTHER; note = guanosine
  modified_base 16: mod_base = OTHER; note = adenosine
  modified_base 17: mod_base = OTHER; note = adenosine
  modified_base 18: mod_base = um
  modified_base 19: mod_base = OTHER; note = adenosine
  modified_base 20: mod_base = OTHER; note = 2'-deoxythymidine
  modified_base 21: mod_base = OTHER; note = 2'-deoxythymidine
  source 1..21: mol_type = other RNA
ttctctataatggtgaatatt

SEQ ID NO: 1382 - RNA, 21 nt, synthetic construct
  modified_base 20..21: mod_base = OTHER; note = thymine
  modified_base 1: mod_base = OTHER; note = guanosine
  modified_base 2: mod_base = OTHER; note = uridine
  modified_base 3: mod_base = OTHER; note = uridine
  modified_base 4: mod_base = OTHER; note = cytidine
  modified_base 5: mod_base = OTHER; note = uridine
  modified_base 6: mod_base = OTHER; note = cytidine
  modified_base 7: mod_base = um
  modified_base 8: mod_base = OTHER; note = adenosine
  modified_base 9: mod_base = um
  modified_base 10: mod_base = OTHER; note = adenosine
  modified_base 11: mod_base = OTHER; note = adenosine
  modified_base 12: mod_base = OTHER; note = uridine
  modified_base 13: mod_base = OTHER; note = guanosine
  modified_base 14: mod_base = OTHER; note = guanosine
  modified_base 15: mod_base = OTHER; note = uridine
  modified_base 16: mod_base = OTHER; note = guanosine
  modified_base 17: mod_base = OTHER; note = adenosine
  modified_base 18: mod_base = OTHER; note = adenosine
  modified_base 19: mod_base = OTHER; note = uridine
  modified_base 20: mod_base = OTHER; note = 2'-deoxythymidine
  modified_base 21: mod_base = OTHER; note = 2'-deoxythymidine
  source 1..21: mol_type = other RNA
gttctctataatggtgaattt

SEQ ID NO: 1383 - RNA, 21 nt, synthetic construct
  modified_base 20..21: mod_base = OTHER; note = thymine
  modified_base 1: mod_base = OTHER; note = uridine
  modified_base 2: mod_base = OTHER; note = uridine
  modified_base 3: mod_base = OTHER; note = guanosine
  modified_base 4: mod_base = OTHER; note = uridine
  modified_base 5: mod_base = OTHER; note = uridine
  modified_base 6: mod_base = OTHER; note = cytidine
  modified_base 7: mod_base = OTHER; note = uridine
  modified_base 8: mod_base = OTHER; note = cytidine
  modified_base 9: mod_base = um
  modified_base 10: mod_base = OTHER; note = adenosine
  modified_base 11: mod_base = um
  modified_base 12: mod_base = OTHER; note = adenosine
  modified_base 13: mod_base = OTHER; note = adenosine
  modified_base 14: mod_base = OTHER; note = uridine
  modified_base 15: mod_base = OTHER; note = guanosine
  modified_base 16: mod_base = OTHER; note = guanosine
  modified_base 17: mod_base = OTHER; note = uridine
  modified_base 18: mod_base = OTHER; note = guanosine
  modified_base 19: mod_base = OTHER; note = adenosine
  modified_base 20: mod_base = OTHER; note = 2'-deoxythymidine
  modified_base 21: mod_base = OTHER; note = 2'-deoxythymidine
  source 1..21: mol_type = other RNA
ttgttctctataatggtgatt

SEQ ID NO: 1384 - RNA, 21 nt, synthetic construct
  modified_base 20..21: mod_base = OTHER; note = thymine
  modified_base 1: mod_base = OTHER; note = uridine
  modified_base 2: mod_base = OTHER; note = uridine
  modified_base 3: mod_base = OTHER; note = uridine
  modified_base 4: mod_base = OTHER; note = guanosine
  modified_base 5: mod_base = OTHER; note = uridine
  modified_base 6: mod_base = OTHER; note = uridine
  modified_base 7: mod_base = OTHER; note = cytidine
  modified_base 8: mod_base = OTHER; note = uridine
  modified_base 9: mod_base = OTHER; note = cytidine
  modified_base 10: mod_base = um
  modified_base 11: mod_base = OTHER; note = adenosine
  modified_base 12: mod_base = um
  modified_base 13: mod_base = OTHER; note = adenosine
  modified_base 14: mod_base = OTHER; note = adenosine
  modified_base 15: mod_base = OTHER; note = uridine
  modified_base 16: mod_base = OTHER; note = guanosine
  modified_base 17: mod_base = OTHER; note = guanosine
  modified_base 18: mod_base = OTHER; note = uridine
  modified_base 19: mod_base = OTHER; note = guanosine
  modified_base 20: mod_base = OTHER; note = 2'-deoxythymidine
  modified_base 21: mod_base = OTHER; note = 2'-deoxythymidine
  source 1..21: mol_type = other RNA
tttgttctctataatggtgtt

SEQ ID NO: 1385 - RNA, 21 nt, synthetic construct
  modified_base 20..21: mod_base = OTHER; note = thymine
  modified_base 1: mod_base = OTHER; note = adenosine
  modified_base 2: mod_base = OTHER; note = uridine
  modified_base 3: mod_base = OTHER; note = uridine
  modified_base 4: mod_base = OTHER; note = uridine
  modified_base 5: mod_base = OTHER; note = guanosine
  modified_base 6: mod_base = OTHER; note = uridine
  modified_base 7: mod_base = OTHER; note = uridine
  modified_base 8: mod_base = OTHER; note = cytidine
  modified_base 9: mod_base = OTHER; note = uridine
  modified_base 10: mod_base = OTHER; note = cytidine
  modified_base 11: mod_base = um
  modified_base 12: mod_base = OTHER; note = adenosine
  modified_base 13: mod_base = um
  modified_base 14: mod_base = OTHER; note = adenosine
  modified_base 15: mod_base = OTHER; note = adenosine
  modified_base 16: mod_base = OTHER; note = uridine
  modified_base 17: mod_base = OTHER; note = guanosine
  modified_base 18: mod_base = OTHER; note = guanosine
  modified_base 19: mod_base = OTHER; note = uridine
  modified_base 20: mod_base = OTHER; note = 2'-deoxythymidine
  modified_base 21: mod_base = OTHER; note = 2'-deoxythymidine
  source 1..21: mol_type = other RNA
atttgttctctataatggttt

SEQ ID NO: 1386 - RNA, 21 nt, synthetic construct
  modified_base 20..21: mod_base = OTHER; note = thymine
  modified_base 1: mod_base = OTHER; note = adenosine
  modified_base 2: mod_base = OTHER; note = adenosine
  modified_base 3: mod_base = OTHER; note = uridine
  modified_base 4: mod_base = OTHER; note = uridine
  modified_base 5: mod_base = OTHER; note = uridine
  modified_base 6: mod_base = OTHER; note = guanosine
  modified_base 7: mod_base = OTHER; note = uridine
  modified_base 8: mod_base = OTHER; note = uridine
  modified_base 9: mod_base = OTHER; note = cytidine
  modified_base 10: mod_base = OTHER; note = uridine
  modified_base 11: mod_base = OTHER; note = cytidine
  modified_base 12: mod_base = um
  modified_base 13: mod_base = OTHER; note = adenosine
  modified_base 14: mod_base = um
  modified_base 15: mod_base = OTHER; note = adenosine
  modified_base 16: mod_base = OTHER; note = adenosine
  modified_base 17: mod_base = OTHER; note = uridine
  modified_base 18: mod_base = OTHER; note = guanosine
  modified_base 19: mod_base = OTHER; note = guanosine
  modified_base 20: mod_base = OTHER; note = 2'-deoxythymidine
  modified_base 21: mod_base = OTHER; note = 2'-deoxythymidine
  source 1..21: mol_type = other RNA
aatttgttctctataatggtt

SEQ ID NO: 1387 - RNA, 21 nt, synthetic construct
  modified_base 20..21: mod_base = OTHER; note = thymine
  modified_base 1: mod_base = um
  modified_base 2: mod_base = OTHER; note = adenosine
  modified_base 3: mod_base = OTHER; note = adenosine
  modified_base 4: mod_base = OTHER; note = uridine
  modified_base 5: mod_base = OTHER; note = uridine
  modified_base 6: mod_base = OTHER; note = uridine
  modified_base 7: mod_base = OTHER; note = guanosine
  modified_base 8: mod_base = OTHER; note = uridine
  modified_base 9: mod_base = OTHER; note = uridine
  modified_base 10: mod_base = OTHER; note = cytidine
  modified_base 11: mod_base = OTHER; note = uridine
  modified_base 12: mod_base = OTHER; note = cytidine
  modified_base 13: mod_base = um
  modified_base 14: mod_base = OTHER; note = adenosine
  modified_base 15: mod_base = um
  modified_base 16: mod_base = OTHER; note = adenosine
  modified_base 17: mod_base = OTHER; note = adenosine
  modified_base 18: mod_base = OTHER; note = uridine
  modified_base 19: mod_base = OTHER; note = guanosine
  modified_base 20: mod_base = OTHER; note = 2'-deoxythymidine
  modified_base 21: mod_base = OTHER; note = 2'-deoxythymidine
  source 1..21: mol_type = other RNA
taatttgttctctataatgtt

SEQ ID NO: 1388 - RNA, 21 nt, synthetic construct
  modified_base 20..21: mod_base = OTHER; note = thymine
  modified_base 1: mod_base = OTHER; note = uridine
  modified_base 2: mod_base = um
  modified_base 3: mod_base = OTHER; note = adenosine
  modified_base 4: mod_base = OTHER; note = adenosine
  modified_base 5: mod_base = OTHER; note = uridine
  modified_base 6: mod_base = OTHER; note = uridine
  modified_base 7: mod_base = OTHER; note = uridine
  modified_base 8: mod_base = OTHER; note = guanosine
  modified_base 9: mod_base = OTHER; note = uridine
  modified_base 10: mod_base = OTHER; note = uridine
  modified_base 11: mod_base = OTHER; note = cytidine
  modified_base 12: mod_base = OTHER; note = uridine
  modified_base 13: mod_base = OTHER; note = cytidine
  modified_base 14: mod_base = um
  modified_base 15: mod_base = OTHER; note = adenosine
  modified_base 16: mod_base = um
  modified_base 17: mod_base = OTHER; note = adenosine
  modified_base 18: mod_base = OTHER; note = adenosine
  modified_base 19: mod_base = OTHER; note = uridine
  modified_base 20: mod_base = OTHER; note = 2'-deoxythymidine
  modified_base 21: mod_base = OTHER; note = 2'-deoxythymidine
  source 1..21: mol_type = other RNA
ttaatttgttctctataattt

SEQ ID NO: 1389 - RNA, 21 nt, synthetic construct
  modified_base 20..21: mod_base = OTHER; note = thymine
  modified_base 1: mod_base = OTHER; note = uridine
  modified_base 2: mod_base = OTHER; note = uridine
  modified_base 3: mod_base = um
  modified_base 4: mod_base = OTHER; note = adenosine
  modified_base 5: mod_base = OTHER; note = adenosine
  modified_base 6: mod_base = OTHER; note = uridine
  modified_base 7: mod_base = OTHER; note = uridine
  modified_base 8: mod_base = OTHER; note = uridine
  modified_base 9: mod_base = OTHER; note = guanosine
  modified_base 10: mod_base = OTHER; note = uridine
  modified_base 11: mod_base = OTHER; note = uridine
  modified_base 12: mod_base = OTHER; note = cytidine
  modified_base 13: mod_base = OTHER; note = uridine
  modified_base 14: mod_base = OTHER; note = cytidine
  modified_base 15: mod_base = um
  modified_base 16: mod_base = OTHER; note = adenosine
  modified_base 17: mod_base = um
  modified_base 18: mod_base = OTHER; note = adenosine
  modified_base 19: mod_base = OTHER; note = adenosine
  modified_base 20: mod_base = OTHER; note = 2'-deoxythymidine
  modified_base 21: mod_base = OTHER; note = 2'-deoxythymidine
  source 1..21: mol_type = other RNA
tttaatttgttctctataatt

SEQ ID NO: 1390 - RNA, 21 nt, synthetic construct
  modified_base 20..21: mod_base = OTHER; note = thymine
  modified_base 1: mod_base = OTHER; note = uridine
  modified_base 2: mod_base = OTHER; note = uridine
  modified_base 3: mod_base = OTHER; note = uridine
  modified_base 4: mod_base = um
  modified_base 5: mod_base = OTHER; note = adenosine
  modified_base 6: mod_base = OTHER; note = adenosine
  modified_base 7: mod_base = OTHER; note = uridine
  modified_base 8: mod_base = OTHER; note = uridine
  modified_base 9: mod_base = OTHER; note = uridine
  modified_base 10: mod_base = OTHER; note = guanosine
  modified_base 11: mod_base = OTHER; note = uridine
  modified_base 12: mod_base = OTHER; note = uridine
  modified_base 13: mod_base = OTHER; note = cytidine
  modified_base 14: mod_base = OTHER; note = uridine
  modified_base 15: mod_base = OTHER; note = cytidine
  modified_base 16: mod_base = um
  modified_base 17: mod_base = OTHER; note = adenosine
  modified_base 18: mod_base = um
  modified_base 19: mod_base = OTHER; note = adenosine
  modified_base 20: mod_base = OTHER; note = 2'-deoxythymidine
  modified_base 21: mod_base = OTHER; note = 2'-deoxythymidine
  source 1..21: mol_type = other RNA
ttttaatttgttctctatatt

SEQ ID NO: 1391 - RNA, 21 nt, synthetic construct
  modified_base 20..21: mod_base = OTHER; note = thymine
  modified_base 1: mod_base = OTHER; note = cytidine
  modified_base 2: mod_base = OTHER; note = uridine
  modified_base 3: mod_base = OTHER; note = uridine
  modified_base 4: mod_base = OTHER; note = uridine
  modified_base 5: mod_base = um
  modified_base 6: mod_base = OTHER; note = adenosine
  modified_base 7: mod_base = OTHER; note = adenosine
  modified_base 8: mod_base = OTHER; note = uridine
  modified_base 9: mod_base = OTHER; note = uridine
  modified_base 10: mod_base = OTHER; note = uridine
  modified_base 11: mod_base = OTHER; note = guanosine
  modified_base 12: mod_base = OTHER; note = uridine
  modified_base 13: mod_base = OTHER; note = uridine
  modified_base 14: mod_base = OTHER; note = cytidine
  modified_base 15: mod_base = OTHER; note = uridine
  modified_base 16: mod_base = OTHER; note = cytidine
  modified_base 17: mod_base = um
  modified_base 18: mod_base = OTHER; note = adenosine
  modified_base 19: mod_base = OTHER; note = uridine
  modified_base 20: mod_base = OTHER; note = 2'-deoxythymidine
  modified_base 21: mod_base = OTHER; note = 2'-deoxythymidine
  source 1..21: mol_type = other RNA
cttttaatttgttctctattt

SEQ ID NO: 1392 - RNA, 21 nt, synthetic construct
  modified_base 20..21: mod_base = OTHER; note = thymine
  modified_base 1: mod_base = OTHER; note = uridine
  modified_base 2: mod_base = OTHER; note = cytidine
  modified_base 3: mod_base = OTHER; note = uridine
  modified_base 4: mod_base = OTHER; note = uridine
  modified_base 5: mod_base = OTHER; note = uridine
  modified_base 6: mod_base = um
  modified_base 7: mod_base = OTHER; note = adenosine
  modified_base 8: mod_base = OTHER; note = adenosine
  modified_base 9: mod_base = OTHER; note = uridine
  modified_base 10: mod_base = OTHER; note = uridine
  modified_base 11: mod_base = OTHER; note = uridine
  modified_base 12: mod_base = OTHER; note = guanosine
  modified_base 13: mod_base = OTHER; note = uridine
  modified_base 14: mod_base = OTHER; note = uridine
  modified_base 15: mod_base = OTHER; note = cytidine
  modified_base 16: mod_base = OTHER; note = uridine
  modified_base 17: mod_base = OTHER; note = cytidine
  modified_base 18: mod_base = um
  modified_base 19: mod_base = OTHER; note = adenosine
  modified_base 20: mod_base = OTHER; note = 2'-deoxythymidine
  modified_base 21: mod_base = OTHER; note = 2'-deoxythymidine
  source 1..21: mol_type = other RNA
tcttttaatttgttctctatt

SEQ ID NO: 1393 - RNA, 21 nt, synthetic construct
  modified_base 20..21: mod_base = OTHER; note = thymine
  modified_base 1: mod_base = OTHER; note = cytidine
  modified_base 2: mod_base = OTHER; note = uridine
  modified_base 3: mod_base = OTHER; note = cytidine
  modified_base 4: mod_base = OTHER; note = uridine
  modified_base 5: mod_base = OTHER; note = uridine
  modified_base 6: mod_base = OTHER; note = uridine
  modified_base 7: mod_base = um
  modified_base 8: mod_base = OTHER; note = adenosine
  modified_base 9: mod_base = OTHER; note = adenosine
  modified_base 10: mod_base = OTHER; note = uridine
  modified_base 11: mod_base = OTHER; note = uridine
  modified_base 12: mod_base = OTHER; note = uridine
  modified_base 13: mod_base = OTHER; note = guanosine
  modified_base 14: mod_base = OTHER; note = uridine
  modified_base 15: mod_base = OTHER; note = uridine
  modified_base 16: mod_base = OTHER; note = cytidine
  modified_base 17: mod_base = OTHER; note = uridine
  modified_base 18: mod_base = OTHER; note = cytidine
  modified_base 19: mod_base = OTHER; note = uridine
  modified_base 20: mod_base = OTHER; note = 2'-deoxythymidine
  modified_base 21: mod_base = OTHER; note = 2'-deoxythymidine
  source 1..21: mol_type = other RNA
ctcttttaatttgttctcttt

SEQ ID NO: 1394 - RNA, 21 nt, synthetic construct
  modified_base 20..21: mod_base = OTHER; note = thymine
  modified_base 1: mod_base = OTHER; note = guanosine
  modified_base 2: mod_base = OTHER; note = guanosine
  modified_base 3: mod_base = OTHER; note = adenosine
  modified_base 4: mod_base = OTHER; note = cytidine
  modified_base 5: mod_base = cm
  modified_base 6: mod_base = OTHER; note = adenosine
  modified_base 7: mod_base = um
  modified_base 8: mod_base = OTHER; note = adenosine
  modified_base 9: mod_base = OTHER; note = guanosine
  modified_base 10: mod_base = OTHER; note = guanosine
  modified_base 11: mod_base = um
  modified_base 12: mod_base = OTHER; note = adenosine
  modified_base 13: mod_base = cm
  modified_base 14: mod_base = OTHER; note = adenosine
  modified_base 15: mod_base = OTHER; note = uridine
  modified_base 16: mod_base = OTHER; note = cytidine
  modified_base 17: mod_base = OTHER; note = uridine
  modified_base 18: mod_base = OTHER; note = uridine
  modified_base 19: mod_base = OTHER; note = cytidine
  modified_base 20: mod_base = OTHER; note = 2'-deoxythymidine
  modified_base 21: mod_base = OTHER; note = 2'-deoxythymidine
  source 1..21: mol_type = other RNA
ggaccataggtacatcttctt

SEQ ID NO: 1395 - RNA, 21 nt, synthetic construct
  modified_base 20..21: mod_base = OTHER; note = thymine
  modified_base 1: mod_base = OTHER; note = adenosine
  modified_base 2: mod_base = OTHER; note = guanosine
  modified_base 3: mod_base = OTHER; note = guanosine
  modified_base 4: mod_base = OTHER; note = adenosine
  modified_base 5: mod_base = OTHER; note = cytidine
  modified_base 6: mod_base = cm
  modified_base 7: mod_base = OTHER; note = adenosine
  modified_base 8: mod_base = um
  modified_base 9: mod_base = OTHER; note = adenosine
  modified_base 10: mod_base = OTHER; note = guanosine
  modified_base 11: mod_base = OTHER; note = guanosine
  modified_base 12: mod_base = um
  modified_base 13: mod_base = OTHER; note = adenosine
  modified_base 14: mod_base = cm
  modified_base 15: mod_base = OTHER; note = adenosine
  modified_base 16: mod_base = OTHER; note = uridine
  modified_base 17: mod_base = OTHER; note = cytidine
  modified_base 18: mod_base = OTHER; note = uridine
  modified_base 19: mod_base = OTHER; note = uridine
  modified_base 20: mod_base = OTHER; note = 2'-deoxythymidine
  modified_base 21: mod_base = OTHER; note = 2'-deoxythymidine
  source 1..21: mol_type = other RNA
aggaccataggtacatctttt

SEQ ID NO: 1396 - RNA, 21 nt, synthetic construct
  modified_base 20..21: mod_base = OTHER; note = thymine
  modified_base 1: mod_base = um
  modified_base 2: mod_base = OTHER; note = adenosine
  modified_base 3: mod_base = OTHER; note = guanosine
  modified_base 4: mod_base = OTHER; note = guanosine
  modified_base 5: mod_base = OTHER; note = adenosine
  modified_base 6: mod_base = OTHER; note = cytidine
  modified_base 7: mod_base = cm
  modified_base 8: mod_base = OTHER; note = adenosine
  modified_base 9: mod_base = um
  modified_base 10: mod_base = OTHER; note = adenosine
  modified_base 11: mod_base = OTHER; note = guanosine
  modified_base 12: mod_base = OTHER; note = guanosine
  modified_base 13: mod_base = um
  modified_base 14: mod_base = OTHER; note = adenosine
  modified_base 15: mod_base = cm
  modified_base 16: mod_base = OTHER; note = adenosine
  modified_base 17: mod_base = OTHER; note = uridine
  modified_base 18: mod_base = OTHER; note = cytidine
  modified_base 19: mod_base = OTHER; note = uridine
  modified_base 20: mod_base = OTHER; note = 2'-deoxythymidine
  modified_base 21: mod_base = OTHER; note = 2'-deoxythymidine
  source 1..21: mol_type = other RNA
taggaccataggtacatcttt

SEQ ID NO: 1397 - RNA, 21 nt, synthetic construct
  modified_base 20..21: mod_base = OTHER; note = thymine
  modified_base 1: mod_base = OTHER; note = cytidine
  modified_base 2: mod_base = um
  modified_base 3: mod_base = OTHER; note = adenosine
  modified_base 4: mod_base = OTHER; note = guanosine
  modified_base 5: mod_base = OTHER; note = guanosine
  modified_base 6: mod_base = OTHER; note = adenosine
  modified_base 7: mod_base = OTHER; note = cytidine
  modified_base 8: mod_base = cm
  modified_base 9: mod_base = OTHER; note = adenosine
  modified_base 10: mod_base = um
  modified_base 11: mod_base = OTHER; note = adenosine
  modified_base 12: mod_base = OTHER; note = guanosine
  modified_base 13: mod_base = OTHER; note = guanosine
  modified_base 14: mod_base = um
  modified_base 15: mod_base = OTHER; note = adenosine
  modified_base 16: mod_base = cm
  modified_base 17: mod_base = OTHER; note = adenosine
  modified_base 18: mod_base = OTHER; note = uridine
  modified_base 19: mod_base = OTHER; note = cytidine
  modified_base 20: mod_base = OTHER; note = 2'-deoxythymidine
  modified_base 21: mod_base = OTHER; note = 2'-deoxythymidine
  source 1..21: mol_type = other RNA
ctaggaccataggtacatctt

SEQ ID NO: 1398 - RNA, 21 nt, synthetic construct
  modified_base 20..21: mod_base = OTHER; note = thymine
  modified_base 1: mod_base = OTHER; note = adenosine
  modified_base 2: mod_base = OTHER; note = cytidine
  modified_base 3: mod_base = um
  modified_base 4: mod_base = OTHER; note = adenosine
  modified_base 5: mod_base = OTHER; note = guanosine
  modified_base 6: mod_base = OTHER; note = guanosine
  modified_base 7: mod_base = OTHER; note = adenosine
  modified_base 8: mod_base = OTHER; note = cytidine
  modified_base 9: mod_base = cm
  modified_base 10: mod_base = OTHER; note = adenosine
  modified_base 11: mod_base = um
  modified_base 12: mod_base = OTHER; note = adenosine
  modified_base 13: mod_base = OTHER; note = guanosine
  modified_base 14: mod_base = OTHER; note = guanosine
  modified_base 15: mod_base = um
  modified_base 16: mod_base = OTHER; note = adenosine
  modified_base 17: mod_base = cm
  modified_base 18: mod_base = OTHER; note = adenosine
  modified_base 19: mod_base = OTHER; note = uridine
  modified_base 20: mod_base = OTHER; note = 2'-deoxythymidine
  modified_base 21: mod_base = OTHER; note = 2'-deoxythymidine
  source 1..21: mol_type = other RNA
actaggaccataggtacattt

SEQ ID NO: 1399 - RNA, 21 nt, synthetic construct
  modified_base 20..21: mod_base = OTHER; note = thymine
  modified_base 1: mod_base = um
  modified_base 2: mod_base = OTHER; note = adenosine
  modified_base 3: mod_base = OTHER; note = cytidine
  modified_base 4: mod_base = um
  modified_base 5: mod_base = OTHER; note = adenosine
  modified_base 6: mod_base = OTHER; note = guanosine
  modified_base 7: mod_base = OTHER; note = guanosine
  modified_base 8: mod_base = OTHER; note = adenosine
  modified_base 9: mod_base = OTHER; note = cytidine
  modified_base 10: mod_base = cm
  modified_base 11: mod_base = OTHER; note = adenosine
  modified_base 12: mod_base = um
  modified_base 13: mod_base = OTHER; note = adenosine
  modified_base 14: mod_base = OTHER; note = guanosine
  modified_base 15: mod_base = OTHER; note = guanosine
  modified_base 16: mod_base = um
  modified_base 17: mod_base = OTHER; note = adenosine
  modified_base 18: mod_base = cm
  modified_base 19: mod_base = OTHER; note = adenosine
  modified_base 20: mod_base = OTHER; note = 2'-deoxythymidine
  modified_base 21: mod_base = OTHER; note = 2'-deoxythymidine
  source 1..21: mol_type = other RNA
tactaggaccataggtacatt

SEQ ID NO: 1400 - RNA, 21 nt, synthetic construct
  modified_base 20..21: mod_base = OTHER; note = thymine
  modified_base 1: mod_base = OTHER; note = cytidine
  modified_base 2: mod_base = um
  modified_base 3: mod_base = OTHER; note = adenosine
  modified_base 4: mod_base = OTHER; note = cytidine
  modified_base 5: mod_base = um
  modified_base 6: mod_base = OTHER; note = adenosine
  modified_base 7: mod_base = OTHER; note = guanosine
  modified_base 8: mod_base = OTHER; note = guanosine
  modified_base 9: mod_base = OTHER; note = adenosine
  modified_base 10: mod_base = OTHER; note = cytidine
  modified_base 11: mod_base = cm
  modified_base 12: mod_base = OTHER; note = adenosine
  modified_base 13: mod_base = um
  modified_base 14: mod_base = OTHER; note = adenosine
  modified_base 15: mod_base = OTHER; note = guanosine
  modified_base 16: mod_base = OTHER; note = guanosine
  modified_base 17: mod_base = um
  modified_base 18: mod_base = OTHER; note = adenosine
  modified_base 19: mod_base = OTHER; note = cytidine
  modified_base 20: mod_base = OTHER; note = 2'-deoxythymidine
  modified_base 21: mod_base = OTHER; note = 2'-deoxythymidine
  source 1..21: mol_type = other RNA
ctactaggaccataggtactt

SEQ ID NO: 1401 - RNA, 21 nt, synthetic construct
  modified_base 20..21: mod_base = OTHER; note = thymine
  modified_base 1: mod_base = OTHER; note = cytidine
  modified_base 2: mod_base = OTHER; note = cytidine
  modified_base 3: mod_base = um
  modified_base 4: mod_base = OTHER; note = adenosine
  modified_base 5: mod_base = OTHER; note = cytidine
  modified_base 6: mod_base = um
  modified_base 7: mod_base = OTHER; note = adenosine
  modified_base 8: mod_base = OTHER; note = guanosine
  modified_base 9: mod_base = OTHER; note = guanosine
  modified_base 10: mod_base = OTHER; note = adenosine
  modified_base 11: mod_base = OTHER; note = cytidine
  modified_base 12: mod_base = cm
  modified_base 13: mod_base = OTHER; note = adenosine
  modified_base 14: mod_base = um
  modified_base 15: mod_base = OTHER; note = adenosine
  modified_base 16: mod_base = OTHER; note = guanosine
  modified_base 17: mod_base = OTHER; note = guanosine
  modified_base 18: mod_base = um
  modified_base 19: mod_base = OTHER; note = adenosine
  modified_base 20: mod_base = OTHER; note = 2'-deoxythymidine
  modified_base 21: mod_base = OTHER; note = 2'-deoxythymidine
  source 1..21: mol_type = other RNA
cctactaggaccataggtatt

SEQ ID NO: 1402 - RNA, 21 nt, synthetic construct
  modified_base 20..21: mod_base = OTHER; note = thymine
  modified_base 1: mod_base = OTHER; note = uridine
  modified_base 2: mod_base = OTHER; note = cytidine
  modified_base 3: mod_base = OTHER; note = cytidine
  modified_base 4: mod_base = um
  modified_base 5: mod_base = OTHER; note = adenosine
  modified_base 6: mod_base = OTHER; note = cytidine
  modified_base 7: mod_base = um
  modified_base 8: mod_base = OTHER; note = adenosine
  modified_base 9: mod_base = OTHER; note = guanosine
  modified_base 10: mod_base = OTHER; note = guanosine
  modified_base 11: mod_base = OTHER; note = adenosine
  modified_base 12: mod_base = OTHER; note = cytidine
  modified_base 13: mod_base = cm
  modified_base 14: mod_base = OTHER; note = adenosine
  modified_base 15: mod_base = um
  modified_base 16: mod_base = OTHER; note = adenosine
  modified_base 17: mod_base = OTHER; note = guanosine
  modified_base 18: mod_base = OTHER; note = guanosine
  modified_base 19: mod_base = OTHER; note = uridine
  modified_base 20: mod_base = OTHER; note = 2'-deoxythymidine
  modified_base 21: mod_base = OTHER; note = 2'-deoxythymidine
  source 1..21: mol_type = other RNA
tcctactaggaccataggttt

SEQ ID NO: 1403 - RNA, 21 nt, synthetic construct
  modified_base 20..21: mod_base = OTHER; note = thymine
  modified_base 1: mod_base = OTHER; note = uridine
  modified_base 2: mod_base = OTHER; note = uridine
  modified_base 3: mod_base = OTHER; note = cytidine
  modified_base 4: mod_base = OTHER; note = cytidine
  modified_base 5: mod_base = um
  modified_base 6: mod_base = OTHER; note = adenosine
  modified_base 7: mod_base = OTHER; note = cytidine
  modified_base 8: mod_base = um
  modified_base 9: mod_base = OTHER; note = adenosine
  modified_base 10: mod_base = OTHER; note = guanosine
  modified_base 11: mod_base = OTHER; note = guanosine
  modified_base 12: mod_base = OTHER; note = adenosine
  modified_base 13: mod_base = OTHER; note = cytidine
  modified_base 14: mod_base = cm
  modified_base 15: mod_base = OTHER; note = adenosine
  modified_base 16: mod_base = um
  modified_base 17: mod_base = OTHER; note = adenosine
  modified_base 18: mod_base = OTHER; note = guanosine
  modified_base 19: mod_base = OTHER; note = guanosine
  modified_base 20: mod_base = OTHER; note = 2'-deoxythymidine
  modified_base 21: mod_base = OTHER; note = 2'-deoxythymidine
  source 1..21: mol_type = other RNA
ttcctactaggaccataggtt

SEQ ID NO: 1404 - RNA, 21 nt, synthetic construct
  modified_base 20..21: mod_base = OTHER; note = thymine
  modified_base 1: mod_base = OTHER; note = uridine
  modified_base 2: mod_base = OTHER; note = uridine
  modified_base 3: mod_base = OTHER; note = uridine
  modified_base 4: mod_base = OTHER; note = cytidine
  modified_base 5: mod_base = OTHER; note = cytidine
  modified_base 6: mod_base = um
  modified_base 7: mod_base = OTHER; note = adenosine
  modified_base 8: mod_base = OTHER; note = cytidine
  modified_base 9: mod_base = um
  modified_base 10: mod_base = OTHER; note = adenosine
  modified_base 11: mod_base = OTHER; note = guanosine
  modified_base 12: mod_base = OTHER; note = guanosine
  modified_base 13: mod_base = OTHER; note = adenosine
  modified_base 14: mod_base = OTHER; note = cytidine
  modified_base 15: mod_base = cm
  modified_base 16: mod_base = OTHER; note = adenosine
  modified_base 17: mod_base = um
  modified_base 18: mod_base = OTHER; note = adenosine
  modified_base 19: mod_base = OTHER; note = guanosine
  modified_base 20: mod_base = OTHER; note = 2'-deoxythymidine
  modified_base 21: mod_base = OTHER; note = 2'-deoxythymidine
  source 1..21: mol_type = other RNA
tttcctactaggaccatagtt

SEQ ID NO: 1405 - RNA, 21 nt, synthetic construct
  modified_base 20..21: mod_base = OTHER; note = thymine
  modified_base 1: mod_base = OTHER; note = adenosine
  modified_base 2: mod_base = OTHER; note = uridine
  modified_base 3: mod_base = OTHER; note = uridine
  modified_base 4: mod_base = OTHER; note = uridine
  modified_base 5: mod_base = OTHER; note = cytidine
  modified_base 6: mod_base = OTHER; note = cytidine
  modified_base 7: mod_base = um
  modified_base 8: mod_base = OTHER; note = adenosine
  modified_base 9: mod_base = OTHER; note = cytidine
  modified_base 10: mod_base = um
  modified_base 11: mod_base = OTHER; note = adenosine
  modified_base 12: mod_base = OTHER; note = guanosine
  modified_base 13: mod_base = OTHER; note = guanosine
  modified_base 14: mod_base = OTHER; note = adenosine
  modified_base 15: mod_base = OTHER; note = cytidine
  modified_base 16: mod_base = cm
  modified_base 17: mod_base = OTHER; note = adenosine
  modified_base 18: mod_base = um
  modified_base 19: mod_base = OTHER; note = adenosine
  modified_base 20: mod_base = OTHER; note = 2'-deoxythymidine
  modified_base 21: mod_base = OTHER; note = 2'-deoxythymidine
  source 1..21: mol_type = other RNA
atttcctactaggaccatatt

SEQ ID NO: 1406 - RNA, 21 nt, synthetic construct
  modified_base 20..21: mod_base = OTHER; note = thymine
  modified_base 1: mod_base = um
  modified_base 2: mod_base = OTHER; note = adenosine
  modified_base 3: mod_base = OTHER; note = uridine
  modified_base 4: mod_base = OTHER; note = uridine
  modified_base 5: mod_base = OTHER; note = uridine
  modified_base 6: mod_base = OTHER; note = cytidine
  modified_base 7: mod_base = OTHER; note = cytidine
  modified_base 8: mod_base = um
  modified_base 9: mod_base = OTHER; note = adenosine
  modified_base 10: mod_base = OTHER; note = cytidine
  modified_base 11: mod_base = um
  modified_base 12: mod_base = OTHER; note = adenosine
  modified_base 13: mod_base = OTHER; note = guanosine
  modified_base 14: mod_base = OTHER; note = guanosine
  modified_base 15: mod_base = OTHER; note = adenosine
  modified_base 16: mod_base = OTHER; note = cytidine
  modified_base 17: mod_base = cm
  modified_base 18: mod_base = OTHER; note = adenosine
  modified_base 19: mod_base = OTHER; note = uridine
  modified_base 20: mod_base = OTHER; note = 2'-deoxythymidine
  modified_base 21: mod_base = OTHER; note = 2'-deoxythymidine
  source 1..21: mol_type = other RNA
tatttcctactaggaccattt

SEQ ID NO: 1407 - RNA, 21 nt, synthetic construct
  modified_base 20..21: mod_base = OTHER; note = thymine
  modified_base 1: mod_base = OTHER; note = uridine
  modified_base 2: mod_base = um
  modified_base 3: mod_base = OTHER; note = adenosine
  modified_base 4: mod_base = OTHER; note = uridine
  modified_base 5: mod_base = OTHER; note = uridine
  modified_base 6: mod_base = OTHER; note = uridine
  modified_base 7: mod_base = OTHER; note = cytidine
  modified_base 8: mod_base = OTHER; note = cytidine
  modified_base 9: mod_base = um
  modified_base 10: mod_base = OTHER; note = adenosine
  modified_base 11: mod_base = OTHER; note = cytidine
  modified_base 12: mod_base = um
  modified_base 13: mod_base = OTHER; note = adenosine
  modified_base 14: mod_base = OTHER; note = guanosine
  modified_base 15: mod_base = OTHER; note = guanosine
  modified_base 16: mod_base = OTHER; note = adenosine
  modified_base 17: mod_base = OTHER; note = cytidine
  modified_base 18: mod_base = cm
  modified_base 19: mod_base = OTHER; note = adenosine
  modified_base 20: mod_base = OTHER; note = 2'-deoxythymidine
  modified_base 21: mod_base = OTHER; note = 2'-deoxythymidine
  source 1..21: mol_type = other RNA
ttatttcctactaggaccatt

SEQ ID NO: 1408 - RNA, 21 nt, synthetic construct
  modified_base 20..21: mod_base = OTHER; note = thymine
  modified_base 1: mod_base = OTHER; note = uridine
  modified_base 2: mod_base = OTHER; note = uridine
  modified_base 3: mod_base = um
  modified_base 4: mod_base = OTHER; note = adenosine
  modified_base 5: mod_base = OTHER; note = uridine
  modified_base 6: mod_base = OTHER; note = uridine
  modified_base 7: mod_base = OTHER; note = uridine
  modified_base 8: mod_base = OTHER; note = cytidine
  modified_base 9: mod_base = OTHER; note = cytidine
  modified_base 10: mod_base = um
  modified_base 11: mod_base = OTHER; note = adenosine
  modified_base 12: mod_base = OTHER; note = cytidine
  modified_base 13: mod_base = um
  modified_base 14: mod_base = OTHER; note = adenosine
  modified_base 15: mod_base = OTHER; note = guanosine
  modified_base 16: mod_base = OTHER; note = guanosine
  modified_base 17: mod_base = OTHER; note = adenosine
  modified_base 18: mod_base = OTHER; note = cytidine
  modified_base 19: mod_base = OTHER; note = cytidine
  modified_base 20: mod_base = OTHER; note = 2'-deoxythymidine
  modified_base 21: mod_base = OTHER; note = 2'-deoxythymidine
  source 1..21: mol_type = other RNA
tttatttcctactaggacctt

SEQ ID NO: 1409 - RNA, 21 nt, synthetic construct
  modified_base 20..21: mod_base = OTHER; note = thymine
  modified_base 1: mod_base = OTHER; note = adenosine
  modified_base 2: mod_base = OTHER; note = uridine
  modified_base 3: mod_base = OTHER; note = uridine
  modified_base 4: mod_base = um
  modified_base 5: mod_base = OTHER; note = adenosine
  modified_base 6: mod_base = OTHER; note = uridine
  modified_base 7: mod_base = OTHER; note = uridine
  modified_base 8: mod_base = OTHER; note = uridine
  modified_base 9: mod_base = OTHER; note = cytidine
  modified_base 10: mod_base = OTHER; note = cytidine
  modified_base 11: mod_base = um
  modified_base 12: mod_base = OTHER; note = adenosine
  modified_base 13: mod_base = OTHER; note = cytidine
  modified_base 14: mod_base = um
  modified_base 15: mod_base = OTHER; note = adenosine
  modified_base 16: mod_base = OTHER; note = guanosine
  modified_base 17: mod_base = OTHER; note = guanosine
  modified_base 18: mod_base = OTHER; note = adenosine
  modified_base 19: mod_base = OTHER; note = cytidine
  modified_base 20: mod_base = OTHER; note = 2'-deoxythymidine
  modified_base 21: mod_base = OTHER; note = 2'-deoxythymidine
  source 1..21: mol_type = other RNA
atttatttcctactaggactt

SEQ ID NO: 1410 - RNA, 21 nt, synthetic construct
  modified_base 20..21: mod_base = OTHER; note = thymine
  modified_base 1: mod_base = cm
  modified_base 2: mod_base = OTHER; note = adenosine
  modified_base 3: mod_base = OTHER; note = uridine
  modified_base 4: mod_base = OTHER; note = uridine
  modified_base 5: mod_base = um
  modified_base 6: mod_base = OTHER; note = adenosine
  modified_base 7: mod_base = OTHER; note = uridine
  modified_base 8: mod_base = OTHER; note = uridine
  modified_base 9: mod_base = OTHER; note = uridine
  modified_base 10: mod_base = OTHER; note = cytidine
  modified_base 11: mod_base = OTHER; note = cytidine
  modified_base 12: mod_base = um
  modified_base 13: mod_base = OTHER; note = adenosine
  modified_base 14: mod_base = OTHER; note = cytidine
  modified_base 15: mod_base = um
  modified_base 16: mod_base = OTHER; note = adenosine
  modified_base 17: mod_base = OTHER; note = guanosine
  modified_base 18: mod_base = OTHER; note = guanosine
  modified_base 19: mod_base = OTHER; note = adenosine
  modified_base 20: mod_base = OTHER; note = 2'-deoxythymidine
  modified_base 21: mod_base = OTHER; note = 2'-deoxythymidine
  source 1..21: mol_type = other RNA
catttatttcctactaggatt

SEQ ID NO: 1411 - RNA, 21 nt, synthetic construct
  modified_base 20..21: mod_base = OTHER; note = thymine
  modified_base 1: mod_base = OTHER; note = adenosine
  modified_base 2: mod_base = cm
  modified_base 3: mod_base = OTHER; note = adenosine
  modified_base 4: mod_base = OTHER; note = uridine
  modified_base 5: mod_base = OTHER; note = uridine
  modified_base 6: mod_base = um
  modified_base 7: mod_base = OTHER; note = adenosine
  modified_base 8: mod_base = OTHER; note = uridine
  modified_base 9: mod_base = OTHER; note = uridine
  modified_base 10: mod_base = OTHER; note = uridine
  modified_base 11: mod_base = OTHER; note = cytidine
  modified_base 12: mod_base = OTHER; note = cytidine
  modified_base 13: mod_base = um
  modified_base 14: mod_base = OTHER; note = adenosine
  modified_base 15: mod_base = OTHER; note = cytidine
  modified_base 16: mod_base = um
  modified_base 17: mod_base = OTHER; note = adenosine
  modified_base 18: mod_base = OTHER; note = guanosine
  modified_base 19: mod_base = OTHER; note = guanosine
  modified_base 20: mod_base = OTHER; note = 2'-deoxythymidine
  modified_base 21: mod_base = OTHER; note = 2'-deoxythymidine
  source 1..21: mol_type = other RNA
acatttatttcctactaggtt

SEQ ID NO: 1412 - RNA, 21 nt, synthetic construct
  modified_base 20..21: mod_base = OTHER; note = thymine
  modified_base 1: mod_base = cm
  modified_base 2: mod_base = OTHER; note = adenosine
  modified_base 3: mod_base = cm
  modified_base 4: mod_base = OTHER; note = adenosine
  modified_base 5: mod_base = OTHER; note = uridine
  modified_base 6: mod_base = OTHER; note = uridine
  modified_base 7: mod_base = um
  modified_base 8: mod_base = OTHER; note = adenosine
  modified_base 9: mod_base = OTHER; note = uridine
  modified_base 10: mod_base = OTHER; note = uridine
  modified_base 11: mod_base = OTHER; note = uridine
  modified_base 12: mod_base = OTHER; note = cytidine
  modified_base 13: mod_base = OTHER; note = cytidine
  modified_base 14: mod_base = um
  modified_base 15: mod_base = OTHER; note = adenosine
  modified_base 16: mod_base = OTHER; note = cytidine
  modified_base 17: mod_base = um
  modified_base 18: mod_base = OTHER; note = adenosine
  modified_base 19: mod_base = OTHER; note = guanosine
  modified_base 20: mod_base = OTHER; note = 2'-deoxythymidine
  modified_base 21: mod_base = OTHER; note = 2'-deoxythymidine
  source 1..21: mol_type = other RNA
cacatttatttcctactagtt

SEQ ID NO: 1413 - RNA, 21 nt, synthetic construct
  modified_base 20..21: mod_base = OTHER; note = thymine
  modified_base 1: mod_base = OTHER; note = uridine
  modified_base 2: mod_base = cm
  modified_base 3: mod_base = OTHER; note = adenosine
  modified_base 4: mod_base = cm
  modified_base 5: mod_base = OTHER; note = adenosine
  modified_base 6: mod_base = OTHER; note = uridine
  modified_base 7: mod_base = OTHER; note = uridine
  modified_base 8: mod_base = um
  modified_base 9: mod_base = OTHER; note = adenosine
  modified_base 10: mod_base = OTHER; note = uridine
  modified_base 11: mod_base = OTHER; note = uridine
  modified_base 12: mod_base = OTHER; note = uridine
  modified_base 13: mod_base = OTHER; note = cytidine
  modified_base 14: mod_base = OTHER; note = cytidine
  modified_base 15: mod_base = um
  modified_base 16: mod_base = OTHER; note = adenosine
  modified_base 17: mod_base = OTHER; note = cytidine
  modified_base 18: mod_base = um
  modified_base 19: mod_base = OTHER; note = adenosine
  modified_base 20: mod_base = OTHER; note = 2'-deoxythymidine
  modified_base 21: mod_base = OTHER; note = 2'-deoxythymidine
  source 1..21: mol_type = other RNA
tcacatttatttcctactatt

SEQ ID NO: 1414 - RNA, 21 nt, synthetic construct
  modified_base 20..21: mod_base = OTHER; note = thymine
  modified_base 1: mod_base = OTHER; note = adenosine
  modified_base 2: mod_base = OTHER; note = uridine
  modified_base 3: mod_base = cm
  modified_base 4: mod_base = OTHER; note = adenosine
  modified_base 5: mod_base = cm
  modified_base 6: mod_base = OTHER; note = adenosine
  modified_base 7: mod_base = OTHER; note = uridine
  modified_base 8: mod_base = OTHER; note = uridine
  modified_base 9: mod_base = um
  modified_base 10: mod_base = OTHER; note = adenosine
  modified_base 11: mod_base = OTHER; note = uridine
  modified_base 12: mod_base = OTHER; note = uridine
  modified_base 13: mod_base = OTHER; note = uridine
  modified_base 14: mod_base = OTHER; note = cytidine
  modified_base 15: mod_base = OTHER; note = cytidine
  modified_base 16: mod_base = um
  modified_base 17: mod_base = OTHER; note = adenosine
  modified_base 18: mod_base = OTHER; note = cytidine
  modified_base 19: mod_base = OTHER; note = uridine
  modified_base 20: mod_base = OTHER; note = 2'-deoxythymidine
  modified_base 21: mod_base = OTHER; note = 2'-deoxythymidine
  source 1..21: mol_type = other RNA
atcacatttatttcctacttt

SEQ ID NO: 1415 - RNA, 21 nt, synthetic construct
  modified_base 20..21: mod_base = OTHER; note = thymine
  modified_base 1: mod_base = OTHER; note = uridine
  modified_base 2: mod_base = OTHER; note = uridine
  modified_base 3: mod_base = OTHER; note = uridine
  modified_base 4: mod_base = cm
  modified_base 5: mod_base = OTHER; note = adenosine
  modified_base 6: mod_base = OTHER; note = adenosine
  modified_base 7: mod_base = um
  modified_base 8: mod_base = OTHER; note = adenosine
  modified_base 9: mod_base = OTHER; note = adenosine
  modified_base 10: mod_base = OTHER; note = adenosine
  modified_base 11: mod_base = OTHER; note = adenosine
  modified_base 12: mod_base = OTHER; note = guanosine
  modified_base 13: mod_base = OTHER; note = guanosine
  modified_base 14: mod_base = OTHER; note = adenosine
  modified_base 15: mod_base = OTHER; note = adenosine
  modified_base 16: mod_base = OTHER; note = uridine
  modified_base 17: mod_base = OTHER; note = uridine
  modified_base 18: mod_base = OTHER; note = cytidine
  modified_base 19: mod_base = OTHER; note = cytidine
  modified_base 20: mod_base = OTHER; note = 2'-deoxythymidine
  modified_base 21: mod_base = OTHER; note = 2'-deoxythymidine
  source 1..21: mol_type = other RNA
tttcaataaaaggaattcctt

SEQ ID NO: 1416 - RNA, 21 nt, synthetic construct
  modified_base 20..21: mod_base = OTHER; note = thymine
  modified_base 1: mod_base = OTHER; note = guanosine
  modified_base 2: mod_base = OTHER; note = uridine
  modified_base 3: mod_base = OTHER; note = uridine
  modified_base 4: mod_base = OTHER; note = uridine
  modified_base 5: mod_base = cm
  modified_base 6: mod_base = OTHER; note = adenosine
  modified_base 7: mod_base = OTHER; note = adenosine
  modified_base 8: mod_base = um
  modified_base 9: mod_base = OTHER; note = adenosine
  modified_base 10: mod_base = OTHER; note = adenosine
  modified_base 11: mod_base = OTHER; note = adenosine
  modified_base 12: mod_base = OTHER; note = adenosine
  modified_base 13: mod_base = OTHER; note = guanosine
  modified_base 14: mod_base = OTHER; note = guanosine
  modified_base 15: mod_base = OTHER; note = adenosine
  modified_base 16: mod_base = OTHER; note = adenosine
  modified_base 17: mod_base = OTHER; note = uridine
  modified_base 18: mod_base = OTHER; note = uridine
  modified_base 19: mod_base = OTHER; note = cytidine
  modified_base 20: mod_base = OTHER; note = 2'-deoxythymidine
  modified_base 21: mod_base = OTHER; note = 2'-deoxythymidine
  source 1..21: mol_type = other RNA
gtttcaataaaaggaattctt

SEQ ID NO: 1417 - RNA, 21 nt, synthetic construct
  modified_base 20..21: mod_base = OTHER; note = thymine
  modified_base 1: mod_base = OTHER; note = uridine
  modified_base 2: mod_base = OTHER; note = guanosine
  modified_base 3: mod_base = OTHER; note = uridine
  modified_base 4: mod_base = OTHER; note = uridine
  modified_base 5: mod_base = OTHER; note = uridine
  modified_base 6: mod_base = cm
  modified_base 7: mod_base = OTHER; note = adenosine
  modified_base 8: mod_base = OTHER; note = adenosine
  modified_base 9: mod_base = um
  modified_base 10: mod_base = OTHER; note = adenosine
  modified_base 11: mod_base = OTHER; note = adenosine
  modified_base 12: mod_base = OTHER; note = adenosine
  modified_base 13: mod_base = OTHER; note = adenosine
  modified_base 14: mod_base = OTHER; note = guanosine
  modified_base 15: mod_base = OTHER; note = guanosine
  modified_base 16: mod_base = OTHER; note = adenosine
  modified_base 17: mod_base = OTHER; note = adenosine
  modified_base 18: mod_base = OTHER; note = uridine
  modified_base 19: mod_base = OTHER; note = uridine
  modified_base 20: mod_base = OTHER; note = 2'-deoxythymidine
  modified_base 21: mod_base = OTHER; note = 2'-deoxythymidine
  source 1..21: mol_type = other RNA
tgtttcaataaaaggaatttt

SEQ ID NO: 1418 - RNA, 21 nt, synthetic construct
  modified_base 20..21: mod_base = OTHER; note = thymine
  modified_base 1: mod_base = OTHER; note = adenosine
  modified_base 2: mod_base = OTHER; note = uridine
  modified_base 3: mod_base = OTHER; note = guanosine
  modified_base 4: mod_base = OTHER; note = uridine
  modified_base 5: mod_base = OTHER; note = uridine
  modified_base 6: mod_base = OTHER; note = uridine
  modified_base 7: mod_base = cm
  modified_base 8: mod_base = OTHER; note = adenosine
  modified_base 9: mod_base = OTHER; note = adenosine
  modified_base 10: mod_base = um
  modified_base 11: mod_base = OTHER; note = adenosine
  modified_base 12: mod_base = OTHER; note = adenosine
  modified_base 13: mod_base = OTHER; note = adenosine
  modified_base 14: mod_base = OTHER; note = adenosine
  modified_base 15: mod_base = OTHER; note = guanosine
  modified_base 16: mod_base = OTHER; note = guanosine
  modified_base 17: mod_base = OTHER; note = adenosine
  modified_base 18: mod_base = OTHER; note = adenosine
  modified_base 19: mod_base = OTHER; note = uridine
  modified_base 20: mod_base = OTHER; note = 2'-deoxythymidine
  modified_base 21: mod_base = OTHER; note = 2'-deoxythymidine
  source 1..21: mol_type = other RNA
atgtttcaataaaaggaattt

SEQ ID NO: 1419 - RNA, 21 nt, synthetic construct
  modified_base 20..21: mod_base = OTHER; note = thymine
  modified_base 1: mod_base = OTHER; note = guanosine
  modified_base 2: mod_base = OTHER; note = adenosine
  modified_base 3: mod_base = OTHER; note = uridine
  modified_base 4: mod_base = OTHER; note = guanosine
  modified_base 5: mod_base = OTHER; note = uridine
  modified_base 6: mod_base = OTHER; note = uridine
  modified_base 7: mod_base = OTHER; note = uridine
  modified_base 8: mod_base = cm
  modified_base 9: mod_base = OTHER; note = adenosine
  modified_base 10: mod_base = OTHER; note = adenosine
  modified_base 11: mod_base = um
  modified_base 12: mod_base = OTHER; note = adenosine
  modified_base 13: mod_base = OTHER; note = adenosine
  modified_base 14: mod_base = OTHER; note = adenosine
  modified_base 15: mod_base = OTHER; note = adenosine
  modified_base 16: mod_base = OTHER; note = guanosine
  modified_base 17: mod_base = OTHER; note = guanosine
  modified_base 18: mod_base = OTHER; note = adenosine
  modified_base 19: mod_base = OTHER; note = adenosine
  modified_base 20: mod_base = OTHER; note = 2'-deoxythymidine
  modified_base 21: mod_base = OTHER; note = 2'-deoxythymidine
  source 1..21: mol_type = other RNA
gatgtttcaataaaaggaatt

SEQ ID NO: 1420 - RNA, 21 nt, synthetic construct
  modified_base 20..21: mod_base = OTHER; note = thymine
  modified_base 1: mod_base = OTHER; note = uridine
  modified_base 2: mod_base = OTHER; note = guanosine
  modified_base 3: mod_base = OTHER; note = adenosine
  modified_base 4: mod_base = OTHER; note = uridine
  modified_base 5: mod_base = OTHER; note = guanosine
  modified_base 6: mod_base = OTHER; note = uridine
  modified_base 7: mod_base = OTHER; note = uridine
  modified_base 8: mod_base = OTHER; note = uridine
  modified_base 9: mod_base = cm
  modified_base 10: mod_base = OTHER; note = adenosine
  modified_base 11: mod_base = OTHER; note = adenosine
  modified_base 12: mod_base = um
  modified_base 13: mod_base = OTHER; note = adenosine
  modified_base 14: mod_base = OTHER; note = adenosine
  modified_base 15: mod_base = OTHER; note = adenosine
  modified_base 16: mod_base = OTHER; note = adenosine
  modified_base 17: mod_base = OTHER; note = guanosine
  modified_base 18: mod_base = OTHER; note = guanosine
  modified_base 19: mod_base = OTHER; note = adenosine
  modified_base 20: mod_base = OTHER; note = 2'-deoxythymidine
  modified_base 21: mod_base = OTHER; note = 2'-deoxythymidine
  source 1..21: mol_type = other RNA
tgatgtttcaataaaaggatt

SEQ ID NO: 1421 - RNA, 21 nt, synthetic construct
  modified_base 20..21: mod_base = OTHER; note = thymine
  modified_base 1: mod_base = OTHER; note = cytidine
  modified_base 2: mod_base = OTHER; note = uridine
  modified_base 3: mod_base = OTHER; note = guanosine
  modified_base 4: mod_base = OTHER; note = adenosine
  modified_base 5: mod_base = OTHER; note = uridine
  modified_base 6: mod_base = OTHER; note = guanosine
  modified_base 7: mod_base = OTHER; note = uridine
  modified_base 8: mod_base = OTHER; note = uridine
  modified_base 9: mod_base = OTHER; note = uridine
  modified_base 10: mod_base = cm
  modified_base 11: mod_base = OTHER; note = adenosine
  modified_base 12: mod_base = OTHER; note = adenosine
  modified_base 13: mod_base = um
  modified_base 14: mod_base = OTHER; note = adenosine
  modified_base 15: mod_base = OTHER; note = adenosine
  modified_base 16: mod_base = OTHER; note = adenosine
  modified_base 17: mod_base = OTHER; note = adenosine
  modified_base 18: mod_base = OTHER; note = guanosine
  modified_base 19: mod_base = OTHER; note = guanosine
  modified_base 20: mod_base = OTHER; note = 2'-deoxythymidine
  modified_base 21: mod_base = OTHER; note = 2'-deoxythymidine
  source 1..21: mol_type = other RNA
ctgatgtttcaataaaaggtt

SEQ ID NO: 1422 - RNA, 21 nt, synthetic construct
  modified_base 20..21: mod_base = OTHER; note = thymine
  modified_base 1: mod_base = OTHER; note = guanosine
  modified_base 2: mod_base = OTHER; note = cytidine
  modified_base 3: mod_base = OTHER; note = uridine
  modified_base 4: mod_base = OTHER; note = guanosine
  modified_base 5: mod_base = OTHER; note = adenosine
  modified_base 6: mod_base = OTHER; note = uridine
  modified_base 7: mod_base = OTHER; note = guanosine
  modified_base 8: mod_base = OTHER; note = uridine
  modified_base 9: mod_base = OTHER; note = uridine
  modified_base 10: mod_base = OTHER; note = uridine
  modified_base 11: mod_base = cm
  modified_base 12: mod_base = OTHER; note = adenosine
  modified_base 13: mod_base = OTHER; note = adenosine
  modified_base 14: mod_base = um
  modified_base 15: mod_base = OTHER; note = adenosine
  modified_base 16: mod_base = OTHER; note = adenosine
  modified_base 17: mod_base = OTHER; note = adenosine
  modified_base 18: mod_base = OTHER; note = adenosine
  modified_base 19: mod_base = OTHER; note = guanosine
  modified_base 20: mod_base = OTHER; note = 2'-deoxythymidine
  modified_base 21: mod_base = OTHER; note = 2'-deoxythymidine
  source 1..21: mol_type = other RNA
gctgatgtttcaataaaagtt

SEQ ID NO: 1423 - RNA, 21 nt, synthetic construct
  modified_base 20..21: mod_base = OTHER; note = thymine
  modified_base 1: mod_base = OTHER; note = uridine
  modified_base 2: mod_base = OTHER; note = guanosine
  modified_base 3: mod_base = OTHER; note = cytidine
  modified_base 4: mod_base = OTHER; note = uridine
  modified_base 5: mod_base = OTHER; note = guanosine
  modified_base 6: mod_base = OTHER; note = adenosine
  modified_base 7: mod_base = OTHER; note = uridine
  modified_base 8: mod_base = OTHER; note = guanosine
  modified_base 9: mod_base = OTHER; note = uridine
  modified_base 10: mod_base = OTHER; note = uridine
  modified_base 11: mod_base = OTHER; note = uridine
  modified_base 12: mod_base = cm
  modified_base 13: mod_base = OTHER; note = adenosine
  modified_base 14: mod_base = OTHER; note = adenosine
  modified_base 15: mod_base = um
  modified_base 16: mod_base = OTHER; note = adenosine
  modified_base 17: mod_base = OTHER; note = adenosine
  modified_base 18: mod_base = OTHER; note = adenosine
  modified_base 19: mod_base = OTHER; note = adenosine
  modified_base 20: mod_base = OTHER; note = 2'-deoxythymidine
  modified_base 21: mod_base = OTHER; note = 2'-deoxythymidine
  source 1..21: mol_type = other RNA
tgctgatgtttcaataaaatt

SEQ ID NO: 1424 - RNA, 21 nt, synthetic construct
  modified_base 20..21: mod_base = OTHER; note = thymine
  modified_base 1: mod_base = OTHER; note = uridine
  modified_base 2: mod_base = OTHER; note = uridine
  modified_base 3: mod_base = OTHER; note = guanosine
  modified_base 4: mod_base = OTHER; note = cytidine
  modified_base 5: mod_base = OTHER; note = uridine
  modified_base 6: mod_base = OTHER; note = guanosine
  modified_base 7: mod_base = OTHER; note = adenosine
  modified_base 8: mod_base = OTHER; note = uridine
  modified_base 9: mod_base = OTHER; note = guanosine
  modified_base 10: mod_base = OTHER; note = uridine
  modified_base 11: mod_base = OTHER; note = uridine
  modified_base 12: mod_base = OTHER; note = uridine
  modified_base 13: mod_base = cm
  modified_base 14: mod_base = OTHER; note = adenosine
  modified_base 15: mod_base = OTHER; note = adenosine
  modified_base 16: mod_base = um
  modified_base 17: mod_base = OTHER; note = adenosine
  modified_base 18: mod_base = OTHER; note = adenosine
  modified_base 19: mod_base = OTHER; note = adenosine
  modified_base 20: mod_base = OTHER; note = 2'-deoxythymidine
  modified_base 21: mod_base = OTHER; note = 2'-deoxythymidine
  source 1..21: mol_type = other RNA
ttgctgatgtttcaataaatt

SEQ ID NO: 1425 - RNA, 21 nt, synthetic construct
  modified_base 20..21: mod_base = OTHER; note = thymine
  modified_base 1: mod_base = OTHER; note = uridine
  modified_base 2: mod_base = OTHER; note = uridine
  modified_base 3: mod_base = OTHER; note = uridine
  modified_base 4: mod_base = OTHER; note = guanosine
  modified_base 5: mod_base = OTHER; note = cytidine
  modified_base 6: mod_base = OTHER; note = uridine
  modified_base 7: mod_base = OTHER; note = guanosine
  modified_base 8: mod_base = OTHER; note = adenosine
  modified_base 9: mod_base = OTHER; note = uridine
  modified_base 10: mod_base = OTHER; note = guanosine
  modified_base 11: mod_base = OTHER; note = uridine
  modified_base 12: mod_base = OTHER; note = uridine
  modified_base 13: mod_base = OTHER; note = uridine
  modified_base 14: mod_base = cm
  modified_base 15: mod_base = OTHER; note = adenosine
  modified_base 16: mod_base = OTHER; note = adenosine
  modified_base 17: mod_base = um
  modified_base 18: mod_base = OTHER; note = adenosine
  modified_base 19: mod_base = OTHER; note = adenosine
  modified_base 20: mod_base = OTHER; note = 2'-deoxythymidine
  modified_base 21: mod_base = OTHER; note = 2'-deoxythymidine
  source 1..21: mol_type = other RNA
tttgctgatgtttcaataatt

SEQ ID NO: 1426 - RNA, 21 nt, synthetic construct
  modified_base 20..21: mod_base = OTHER; note = thymine
  modified_base 1: mod_base = OTHER; note = cytidine
  modified_base 2: mod_base = OTHER; note = uridine
  modified_base 3: mod_base = OTHER; note = uridine
  modified_base 4: mod_base = OTHER; note = uridine
  modified_base 5: mod_base = OTHER; note = guanosine
  modified_base 6: mod_base = OTHER; note = cytidine
  modified_base 7: mod_base = OTHER; note = uridine
  modified_base 8: mod_base = OTHER; note = guanosine
  modified_base 9: mod_base = OTHER; note = adenosine
  modified_base 10: mod_base = OTHER; note = uridine
  modified_base 11: mod_base = OTHER; note = guanosine
  modified_base 12: mod_base = OTHER; note = uridine
  modified_base 13: mod_base = OTHER; note = uridine
  modified_base 14: mod_base = OTHER; note = uridine
  modified_base 15: mod_base = cm
  modified_base 16: mod_base = OTHER; note = adenosine
  modified_base 17: mod_base = OTHER; note = adenosine
  modified_base 18: mod_base = um
  modified_base 19: mod_base = OTHER; note = adenosine
  modified_base 20: mod_base = OTHER; note = 2'-deoxythymidine
  modified_base 21: mod_base = OTHER; note = 2'-deoxythymidine
  source 1..21: mol_type = other RNA
ctttgctgatgtttcaatatt

SEQ ID NO: 1427 - DNA, 21 bp, synthetic construct
  modified_base 1: mod_base = OTHER; note = uridine
  modified_base 2: mod_base = OTHER; note = cytidine
  modified_base 3: mod_base = OTHER; note = uridine
  modified_base 4: mod_base = OTHER; note = uridine
  modified_base 5: mod_base = OTHER; note = uridine
  modified_base 6: mod_base = OTHER; note = guanosine
  modified_base 7: mod_base = OTHER; note = cytidine
  modified_base 8: mod_base = OTHER; note = uridine
  modified_base 9: mod_base = OTHER; note = guanosine
  modified_base 10: mod_base = OTHER; note = adenosine
  modified_base 11: mod_base = OTHER; note = uridine
  modified_base 12: mod_base = OTHER; note = guanosine
  modified_base 13: mod_base = OTHER; note = uridine
  modified_base 14: mod_base = OTHER; note = uridine
  modified_base 15: mod_base = OTHER; note = uridine
  modified_base 16: mod_base = cm
  modified_base 17: mod_base = OTHER; note = adenosine
  modified_base 18: mod_base = OTHER; note = adenosine
  modified_base 19: mod_base = OTHER; note = uridine
  modified_base 20: mod_base = OTHER; note = 2'-deoxythymidine
  modified_base 21: mod_base = OTHER; note = 2'-deoxythymidine
  source 1..21: mol_type = other DNA
tctttgctgatgtttcaattt

SEQ ID NO: 1428 - DNA, 21 bp, synthetic construct
  modified_base 1: mod_base = OTHER; note = guanosine
  modified_base 2: mod_base = OTHER; note = uridine
  modified_base 3: mod_base = OTHER; note = cytidine
  modified_base 4: mod_base = OTHER; note = uridine
  modified_base 5: mod_base = OTHER; note = uridine
  modified_base 6: mod_base = OTHER; note = uridine
  modified_base 7: mod_base = OTHER; note = guanosine
  modified_base 8: mod_base = OTHER; note = cytidine
  modified_base 9: mod_base = OTHER; note = uridine
  modified_base 10: mod_base = OTHER; note = guanosine
  modified_base 11: mod_base = OTHER; note = adenosine
  modified_base 12: mod_base = OTHER; note = uridine
  modified_base 13: mod_base = OTHER; note = guanosine
  modified_base 14: mod_base = OTHER; note = uridine
  modified_base 15: mod_base = OTHER; note = uridine
  modified_base 16: mod_base = OTHER; note = uridine
  modified_base 17: mod_base = cm
  modified_base 18: mod_base = OTHER; note = adenosine
  modified_base 19: mod_base = OTHER; note = adenosine
  modified_base 20: mod_base = OTHER; note = 2'-deoxythymidine
  modified_base 21: mod_base = OTHER; note = 2'-deoxythymidine
  source 1..21: mol_type = other DNA
gtctttgctgatgtttcaatt

SEQ ID NO: 1429 - DNA, 21 bp, synthetic construct
  modified_base 1: mod_base = OTHER; note = uridine
  modified_base 2: mod_base = OTHER; note = guanosine
  modified_base 3: mod_base = OTHER; note = uridine
  modified_base 4: mod_base = OTHER; note = cytidine
  modified_base 5: mod_base = OTHER; note = uridine
  modified_base 6: mod_base = OTHER; note = uridine
  modified_base 7: mod_base = OTHER; note = uridine
  modified_base 8: mod_base = OTHER; note = guanosine
  modified_base 9: mod_base = OTHER; note = cytidine
  modified_base 10: mod_base = OTHER; note = uridine
  modified_base 11: mod_base = OTHER; note = guanosine
  modified_base 12: mod_base = OTHER; note = adenosine
  modified_base 13: mod_base = OTHER; note = uridine
  modified_base 14: mod_base = OTHER; note = guanosine
  modified_base 15: mod_base = OTHER; note = uridine
  modified_base 16: mod_base = OTHER; note = uridine
  modified_base 17: mod_base = OTHER; note = uridine
  modified_base 18: mod_base = cm
  modified_base 19: mod_base = OTHER; note = adenosine
  modified_base 20: mod_base = OTHER; note = 2'-deoxythymidine
  modified_base 21: mod_base = OTHER; note = 2'-deoxythymidine
  source 1..21: mol_type = other DNA
tgtctttgctgatgtttcatt

SEQ ID NO: 1430 - DNA, 21 bp, synthetic construct
  modified_base 1: mod_base = OTHER; note = uridine
  modified_base 2: mod_base = OTHER; note = uridine
  modified_base 3: mod_base = OTHER; note = guanosine
  modified_base 4: mod_base = OTHER; note = uridine
  modified_base 5: mod_base = OTHER; note = cytidine
  modified_base 6: mod_base = OTHER; note = uridine
  modified_base 7: mod_base = OTHER; note = uridine
  modified_base 8: mod_base = OTHER; note = uridine
  modified_base 9: mod_base = OTHER; note = guanosine
  modified_base 10: mod_base = OTHER; note = cytidine
  modified_base 11: mod_base = OTHER; note = uridine
  modified_base 12: mod_base = OTHER; note = guanosine
  modified_base 13: mod_base = OTHER; note = adenosine
  modified_base 14: mod_base = OTHER; note = uridine
  modified_base 15: mod_base = OTHER; note = guanosine
  modified_base 16: mod_base = OTHER; note = uridine
  modified_base 17: mod_base = OTHER; note = uridine
  modified_base 18: mod_base = OTHER; note = uridine
  modified_base 19: mod_base = OTHER; note = cytidine
  modified_base 20: mod_base = OTHER; note = 2'-deoxythymidine
  modified_base 21: mod_base = OTHER; note = 2'-deoxythymidine
  source 1..21: mol_type = other DNA
ttgtctttgctgatgtttctt

SEQ ID NO: 1431 - RNA, 21 nt, synthetic construct
  modified_base 20..21: mod_base = OTHER; note = thymine
  modified_base 1: mod_base = cm
  modified_base 2: mod_base = OTHER; note = adenosine
  modified_base 3: mod_base = OTHER; note = adenosine
  modified_base 4: mod_base = OTHER; note = guanosine
  modified_base 5: mod_base = OTHER; note = uridine
  modified_base 6: mod_base = OTHER; note = uridine
  modified_base 7: mod_base = um
  modified_base 8: mod_base = OTHER; note = adenosine
  modified_base 9: mod_base = um
  modified_base 10: mod_base = OTHER; note = adenosine
  modified_base 11: mod_base = OTHER; note = uridine
  modified_base 12: mod_base = OTHER; note = uridine
  modified_base 13: mod_base = cm
  modified_base 14: mod_base = OTHER; note = adenosine
  modified_base 15: mod_base = OTHER; note = guanosine
  modified_base 16: mod_base = OTHER; note = uridine
  modified_base 17: mod_base = cm
  modified_base 18: mod_base = OTHER; note = adenosine
  modified_base 19: mod_base = OTHER; note = uridine
  modified_base 20: mod_base = OTHER; note = 2'-deoxythymidine
  modified_base 21: mod_base = OTHER; note = 2'-deoxythymidine
  source 1..21: mol_type = other RNA
caagtttatattcagtcattt

SEQ ID NO: 1432 - RNA, 21 nt, synthetic construct
  modified_base 20..21: mod_base = OTHER; note = thymine
  modified_base 1: mod_base = OTHER; note = adenosine
  modified_base 2: mod_base = cm
  modified_base 3: mod_base = OTHER; note = adenosine
  modified_base 4: mod_base = OTHER; note = adenosine
  modified_base 5: mod_base = OTHER; note = guanosine
  modified_base 6: mod_base = OTHER; note = uridine
  modified_base 7: mod_base = OTHER; note = uridine
  modified_base 8: mod_base = um
  modified_base 9: mod_base = OTHER; note = adenosine
  modified_base 10: mod_base = um
  modified_base 11: mod_base = OTHER; note = adenosine
  modified_base 12: mod_base = OTHER; note = uridine
  modified_base 13: mod_base = OTHER; note = uridine
  modified_base 14: mod_base = cm
  modified_base 15: mod_base = OTHER; note = adenosine
  modified_base 16: mod_base = OTHER; note = guanosine
  modified_base 17: mod_base = OTHER; note = uridine
  modified_base 18: mod_base = cm
  modified_base 19: mod_base = OTHER; note = adenosine
  modified_base 20: mod_base = OTHER; note = 2'-deoxythymidine
  modified_base 21: mod_base = OTHER; note = 2'-deoxythymidine
  source 1..21: mol_type = other RNA
acaagtttatattcagtcatt

SEQ ID NO: 1433 - RNA, 21 nt, synthetic construct
  modified_base 20..21: mod_base = OTHER; note = thymine
  modified_base 1: mod_base = cm
  modified_base 2: mod_base = OTHER; note = adenosine
  modified_base 3: mod_base = cm
  modified_base 4: mod_base = OTHER; note = adenosine
  modified_base 5: mod_base = OTHER; note = adenosine
  modified_base 6: mod_base = OTHER; note = guanosine
  modified_base 7: mod_base = OTHER; note = uridine
  modified_base 8: mod_base = OTHER; note = uridine
  modified_base 9: mod_base = um
  modified_base 10: mod_base = OTHER; note = adenosine
  modified_base 11: mod_base = um
  modified_base 12: mod_base = OTHER; note = adenosine
  modified_base 13: mod_base = OTHER; note = uridine
  modified_base 14: mod_base = OTHER; note = uridine
  modified_base 15: mod_base = cm
  modified_base 16: mod_base = OTHER; note = adenosine
  modified_base 17: mod_base = OTHER; note = guanosine
  modified_base 18: mod_base = OTHER; note = uridine
  modified_base 19: mod_base = OTHER; note = cytidine
  modified_base 20: mod_base = OTHER; note = 2'-deoxythymidine
  modified_base 21: mod_base = OTHER; note = 2'-deoxythymidine
  source 1..21: mol_type = other RNA
cacaagtttatattcagtctt

SEQ ID NO: 1434 - RNA, 21 nt, synthetic construct
  modified_base 20..21: mod_base = OTHER; note = thymine
  modified_base 1: mod_base = OTHER; note = cytidine
  modified_base 2: mod_base = cm
  modified_base 3: mod_base = OTHER; note = adenosine
  modified_base 4: mod_base = cm
  modified_base 5: mod_base = OTHER; note = adenosine
  modified_base 6: mod_base = OTHER; note = adenosine
  modified_base 7: mod_base = OTHER; note = guanosine
  modified_base 8: mod_base = OTHER; note = uridine
  modified_base 9: mod_base = OTHER; note = uridine
  modified_base 10: mod_base = um
  modified_base 11: mod_base = OTHER; note = adenosine
  modified_base 12: mod_base = um
  modified_base 13: mod_base = OTHER; note = adenosine
  modified_base 14: mod_base = OTHER; note = uridine
  modified_base 15: mod_base = OTHER; note = uridine
  modified_base 16: mod_base = cm
  modified_base 17: mod_base = OTHER; note = adenosine
  modified_base 18: mod_base = OTHER; note = guanosine
  modified_base 19: mod_base = OTHER; note = uridine
  modified_base 20: mod_base = OTHER; note = 2'-deoxythymidine
  modified_base 21: mod_base = OTHER; note = 2'-deoxythymidine
  source 1..21: mol_type = other RNA
ccacaagtttatattcagttt

SEQ ID NO: 1435 - RNA, 21 nt, synthetic construct
  modified_base 20..21: mod_base = OTHER; note = thymine
  modified_base 1: mod_base = OTHER; note = adenosine
  modified_base 2: mod_base = OTHER; note = cytidine
  modified_base 3: mod_base = cm
  modified_base 4: mod_base = OTHER; note = adenosine
  modified_base 5: mod_base = cm
  modified_base 6: mod_base = OTHER; note = adenosine
  modified_base 7: mod_base = OTHER; note = adenosine
  modified_base 8: mod_base = OTHER; note = guanosine
  modified_base 9: mod_base = OTHER; note = uridine
  modified_base 10: mod_base = OTHER; note = uridine
  modified_base 11: mod_base = um
  modified_base 12: mod_base = OTHER; note = adenosine
  modified_base 13: mod_base = um
  modified_base 14: mod_base = OTHER; note = adenosine
  modified_base 15: mod_base = OTHER; note = uridine
  modified_base 16: mod_base = OTHER; note = uridine
  modified_base 17: mod_base = cm
  modified_base 18: mod_base = OTHER; note = adenosine
  modified_base 19: mod_base = OTHER; note = guanosine
  modified_base 20: mod_base = OTHER; note = 2'-deoxythymidine
  modified_base 21: mod_base = OTHER; note = 2'-deoxythymidine
  source 1..21: mol_type = other RNA
accacaagtttatattcagtt

SEQ ID NO: 1436 - RNA, 21 nt, synthetic construct
  modified_base 20..21: mod_base = OTHER; note = thymine
  modified_base 1: mod_base = um
  modified_base 2: mod_base = OTHER; note = adenosine
  modified_base 3: mod_base = OTHER; note = cytidine
  modified_base 4: mod_base = cm
  modified_base 5: mod_base = OTHER; note = adenosine
  modified_base 6: mod_base = cm
  modified_base 7: mod_base = OTHER; note = adenosine
  modified_base 8: mod_base = OTHER; note = adenosine
  modified_base 9: mod_base = OTHER; note = guanosine
  modified_base 10: mod_base = OTHER; note = uridine
  modified_base 11: mod_base = OTHER; note = uridine
  modified_base 12: mod_base = um
  modified_base 13: mod_base = OTHER; note = adenosine
  modified_base 14: mod_base = um
  modified_base 15: mod_base = OTHER; note = adenosine
  modified_base 16: mod_base = OTHER; note = uridine
  modified_base 17: mod_base = OTHER; note = uridine
  modified_base 18: mod_base = cm
  modified_base 19: mod_base = OTHER; note = adenosine
  modified_base 20: mod_base = OTHER; note = 2'-deoxythymidine
  modified_base 21: mod_base = OTHER; note = 2'-deoxythymidine
  source 1..21: mol_type = other RNA
taccacaagtttatattcatt

SEQ ID NO: 1437 - RNA, 21 nt, synthetic construct
  modified_base 20..21: mod_base = OTHER; note = thymine
  modified_base 1: mod_base = OTHER; note = cytidine
  modified_base 2: mod_base = um
  modified_base 3: mod_base = OTHER; note = adenosine
  modified_base 4: mod_base = OTHER; note = cytidine
  modified_base 5: mod_base = cm
  modified_base 6: mod_base = OTHER; note = adenosine
  modified_base 7: mod_base = cm
  modified_base 8: mod_base = OTHER; note = adenosine
  modified_base 9: mod_base = OTHER; note = adenosine
  modified_base 10: mod_base = OTHER; note = guanosine
  modified_base 11: mod_base = OTHER; note = uridine
  modified_base 12: mod_base = OTHER; note = uridine
  modified_base 13: mod_base = um
  modified_base 14: mod_base = OTHER; note = adenosine
  modified_base 15: mod_base = um
  modified_base 16: mod_base = OTHER; note = adenosine
  modified_base 17: mod_base = OTHER; note = uridine
  modified_base 18: mod_base = OTHER; note = uridine
  modified_base 19: mod_base = OTHER; note = cytidine
  modified_base 20: mod_base = OTHER; note = 2'-deoxythymidine
  modified_base 21: mod_base = OTHER; note = 2'-deoxythymidine
  source 1..21: mol_type = other RNA
ctaccacaagtttatattctt

SEQ ID NO: 1438 - RNA, 21 nt, synthetic construct
  modified_base 20..21: mod_base = OTHER; note = thymine
  modified_base 1: mod_base = OTHER; note = adenosine
  modified_base 2: mod_base = OTHER; note = cytidine
  modified_base 3: mod_base = um
  modified_base 4: mod_base = OTHER; note = adenosine
  modified_base 5: mod_base = OTHER; note = cytidine
  modified_base 6: mod_base = cm
  modified_base 7: mod_base = OTHER; note = adenosine
  modified_base 8: mod_base = cm
  modified_base 9: mod_base = OTHER; note = adenosine
  modified_base 10: mod_base = OTHER; note = adenosine
  modified_base 11: mod_base = OTHER; note = guanosine
  modified_base 12: mod_base = OTHER; note = uridine
  modified_base 13: mod_base = OTHER; note = uridine
  modified_base 14: mod_base = um
  modified_base 15: mod_base = OTHER; note = adenosine
  modified_base 16: mod_base = um
  modified_base 17: mod_base = OTHER; note = adenosine
  modified_base 18: mod_base = OTHER; note = uridine
  modified_base 19: mod_base = OTHER; note = uridine
  modified_base 20: mod_base = OTHER; note = 2'-deoxythymidine
  modified_base 21: mod_base = OTHER; note = 2'-deoxythymidine
  source 1..21: mol_type = other RNA
actaccacaagtttatatttt

SEQ ID NO: 1439 - RNA, 21 nt, synthetic construct
  modified_base 20..21: mod_base = OTHER; note = thymine
  modified_base 1: mod_base = OTHER; note = adenosine
  modified_base 2: mod_base = OTHER; note = adenosine
  modified_base 3: mod_base = OTHER; note = cytidine
  modified_base 4: mod_base = um
  modified_base 5: mod_base = OTHER; note = adenosine
  modified_base 6: mod_base = OTHER; note = cytidine
  modified_base 7: mod_base = cm
  modified_base 8: mod_base = OTHER; note = adenosine
  modified_base 9: mod_base = cm
  modified_base 10: mod_base = OTHER; note = adenosine
  modified_base 11: mod_base = OTHER; note = adenosine
  modified_base 12: mod_base = OTHER; note = guanosine
  modified_base 13: mod_base = OTHER; note = uridine
  modified_base 14: mod_base = OTHER; note = uridine
  modified_base 15: mod_base = um
  modified_base 16: mod_base = OTHER; note = adenosine
  modified_base 17: mod_base = um
  modified_base 18: mod_base = OTHER; note = adenosine
  modified_base 19: mod_base = OTHER; note = uridine
  modified_base 20: mod_base = OTHER; note = 2'-deoxythymidine
  modified_base 21: mod_base = OTHER; note = 2'-deoxythymidine
  source 1..21: mol_type = other RNA
aactaccacaagtttatattt

SEQ ID NO: 1440 - RNA, 21 nt, synthetic construct
  modified_base 20..21: mod_base = OTHER; note = thymine
  modified_base 1: mod_base = cm
  modified_base 2: mod_base = OTHER; note = adenosine
  modified_base 3: mod_base = OTHER; note = adenosine
  modified_base 4: mod_base = OTHER; note = cytidine
  modified_base 5: mod_base = um
  modified_base 6: mod_base = OTHER; note = adenosine
  modified_base 7: mod_base = OTHER; note = cytidine
  modified_base 8: mod_base = cm
  modified_base 9: mod_base = OTHER; note = adenosine
  modified_base 10: mod_base = cm
  modified_base 11: mod_base = OTHER; note = adenosine
  modified_base 12: mod_base = OTHER; note = adenosine
  modified_base 13: mod_base = OTHER; note = guanosine
  modified_base 14: mod_base = OTHER; note = uridine
  modified_base 15: mod_base = OTHER; note = uridine
  modified_base 16: mod_base = um
  modified_base 17: mod_base = OTHER; note = adenosine
  modified_base 18: mod_base = um
  modified_base 19: mod_base = OTHER; note = adenosine
  modified_base 20: mod_base = OTHER; note = 2'-deoxythymidine
  modified_base 21: mod_base = OTHER; note = 2'-deoxythymidine
  source 1..21: mol_type = other RNA
caactaccacaagtttatatt

SEQ ID NO: 1441 - RNA, 21 nt, synthetic construct
  modified_base 20..21: mod_base = OTHER; note = thymine
  modified_base 1: mod_base = OTHER; note = cytidine
  modified_base 2: mod_base = cm
  modified_base 3: mod_base = OTHER; note = adenosine
  modified_base 4: mod_base = OTHER; note = adenosine
  modified_base 5: mod_base = OTHER; note = cytidine
  modified_base 6: mod_base = um
  modified_base 7: mod_base = OTHER; note = adenosine
  modified_base 8: mod_base = OTHER; note = cytidine
  modified_base 9: mod_base = cm
  modified_base 10: mod_base = OTHER; note = adenosine
  modified_base 11: mod_base = cm
  modified_base 12: mod_base = OTHER; note = adenosine
  modified_base 13: mod_base = OTHER; note = adenosine
  modified_base 14: mod_base = OTHER; note = guanosine
  modified_base 15: mod_base = OTHER; note = uridine
  modified_base 16: mod_base = OTHER; note = uridine
  modified_base 17: mod_base = um
  modified_base 18: mod_base = OTHER; note = adenosine
  modified_base 19: mod_base = OTHER; note = uridine
  modified_base 20: mod_base = OTHER; note = 2'-deoxythymidine
  modified_base 21: mod_base = OTHER; note = 2'-deoxythymidine
  source 1..21: mol_type = other RNA
ccaactaccacaagtttattt

SEQ ID NO: 1442 - RNA, 21 nt, synthetic construct
  modified_base 20..21: mod_base = OTHER; note = thymine
  modified_base 1: mod_base = OTHER; note = uridine
  modified_base 2: mod_base = OTHER; note = cytidine
  modified_base 3: mod_base = cm
  modified_base 4: mod_base = OTHER; note = adenosine
  modified_base 5: mod_base = OTHER; note = adenosine
  modified_base 6: mod_base = OTHER; note = cytidine
  modified_base 7: mod_base = um
  modified_base 8: mod_base = OTHER; note = adenosine
  modified_base 9: mod_base = OTHER; note = cytidine
  modified_base 10: mod_base = cm
  modified_base 11: mod_base = OTHER; note = adenosine
  modified_base 12: mod_base = cm
  modified_base 13: mod_base = OTHER; note = adenosine
  modified_base 14: mod_base = OTHER; note = adenosine
  modified_base 15: mod_base = OTHER; note = guanosine
  modified_base 16: mod_base = OTHER; note = uridine
  modified_base 17: mod_base = OTHER; note = uridine
  modified_base 18: mod_base = um
  modified_base 19: mod_base = OTHER; note = adenosine
  modified_base 20: mod_base = OTHER; note = 2'-deoxythymidine
  modified_base 21: mod_base = OTHER; note = 2'-deoxythymidine
  source 1..21: mol_type = other RNA
tccaactaccacaagtttatt

SEQ ID NO: 1443 - RNA, 21 nt, synthetic construct
  modified_base 20..21: mod_base = OTHER; note = thymine
  modified_base 1: mod_base = OTHER; note = cytidine
  modified_base 2: mod_base = OTHER; note = uridine
  modified_base 3: mod_base = OTHER; note = cytidine
  modified_base 4: mod_base = cm
  modified_base 5: mod_base = OTHER; note = adenosine
  modified_base 6: mod_base = OTHER; note = adenosine
  modified_base 7: mod_base = OTHER; note = cytidine
  modified_base 8: mod_base = um
  modified_base 9: mod_base = OTHER; note = adenosine
  modified_base 10: mod_base = OTHER; note = cytidine
  modified_base 11: mod_base = cm
  modified_base 12: mod_base = OTHER; note = adenosine
  modified_base 13: mod_base = cm
  modified_base 14: mod_base = OTHER; note = adenosine
  modified_base 15: mod_base = OTHER; note = adenosine
  modified_base 16: mod_base = OTHER; note = guanosine
  modified_base 17: mod_base = OTHER; note = uridine
  modified_base 18: mod_base = OTHER; note = uridine
  modified_base 19: mod_base = OTHER; note = uridine
  modified_base 20: mod_base = OTHER; note = 2'-deoxythymidine
  modified_base 21: mod_base = OTHER; note = 2'-deoxythymidine
  source 1..21: mol_type = other RNA
ctccaactaccacaagttttt

SEQ ID NO: 1444 - RNA, 21 nt, synthetic construct
  modified_base 20..21: mod_base = OTHER; note = thymine
  modified_base 1: mod_base = OTHER; note = guanosine
  modified_base 2: mod_base = OTHER; note = cytidine
  modified_base 3: mod_base = OTHER; note = uridine
  modified_base 4: mod_base = OTHER; note = cytidine
  modified_base 5: mod_base = cm
  modified_base 6: mod_base = OTHER; note = adenosine
  modified_base 7: mod_base = OTHER; note = adenosine
  modified_base 8: mod_base = OTHER; note = cytidine
  modified_base 9: mod_base = um
  modified_base 10: mod_base = OTHER; note = adenosine
  modified_base 11: mod_base = OTHER; note = cytidine
  modified_base 12: mod_base = cm
  modified_base 13: mod_base = OTHER; note = adenosine
  modified_base 14: mod_base = cm
  modified_base 15: mod_base = OTHER; note = adenosine
  modified_base 16: mod_base = OTHER; note = adenosine
  modified_base 17: mod_base = OTHER; note = guanosine
  modified_base 18: mod_base = OTHER; note = uridine
  modified_base 19: mod_base = OTHER; note = uridine
  modified_base 20: mod_base = OTHER; note = 2'-deoxythymidine
  modified_base 21: mod_base = OTHER; note = 2'-deoxythymidine
  source 1..21: mol_type = other RNA
gctccaactaccacaagtttt

SEQ ID NO: 1445 - RNA, 21 nt, synthetic construct
  modified_base 20..21: mod_base = OTHER; note = thymine
  modified_base 1: mod_base = OTHER; note = adenosine
  modified_base 2: mod_base = OTHER; note = guanosine
  modified_base 3: mod_base = OTHER; note = cytidine
  modified_base 4: mod_base = OTHER; note = uridine
  modified_base 5: mod_base = OTHER; note = cytidine
  modified_base 6: mod_base = cm
  modified_base 7: mod_base = OTHER; note = adenosine
  modified_base 8: mod_base = OTHER; note = adenosine
  modified_base 9: mod_base = OTHER; note = cytidine
  modified_base 10: mod_base = um
  modified_base 11: mod_base = OTHER; note = adenosine
  modified_base 12: mod_base = OTHER; note = cytidine
  modified_base 13: mod_base = cm
  modified_base 14: mod_base = OTHER; note = adenosine
  modified_base 15: mod_base = cm
  modified_base 16: mod_base = OTHER; note = adenosine
  modified_base 17: mod_base = OTHER; note = adenosine
  modified_base 18: mod_base = OTHER; note = guanosine
  modified_base 19: mod_base = OTHER; note = uridine
  modified_base 20: mod_base = OTHER; note = 2'-deoxythymidine
  modified_base 21: mod_base = OTHER; note = 2'-deoxythymidine
  source 1..21: mol_type = other RNA
agctccaactaccacaagttt

SEQ ID NO: 1446 - RNA, 21 nt, synthetic construct
  modified_base 20..21: mod_base = OTHER; note = thymine
  modified_base 1: mod_base = cm
  modified_base 2: mod_base = OTHER; note = adenosine
  modified_base 3: mod_base = OTHER; note = guanosine
  modified_base 4: mod_base = OTHER; note = cytidine
  modified_base 5: mod_base = OTHER; note = uridine
  modified_base 6: mod_base = OTHER; note = cytidine
  modified_base 7: mod_base = cm
  modified_base 8: mod_base = OTHER; note = adenosine
  modified_base 9: mod_base = OTHER; note = adenosine
  modified_base 10: mod_base = OTHER; note = cytidine
  modified_base 11: mod_base = um
  modified_base 12: mod_base = OTHER; note = adenosine
  modified_base 13: mod_base = OTHER; note = cytidine
  modified_base 14: mod_base = cm
  modified_base 15: mod_base = OTHER; note = adenosine
  modified_base 16: mod_base = cm
  modified_base 17: mod_base = OTHER; note = adenosine
  modified_base 18: mod_base = OTHER; note = adenosine
  modified_base 19: mod_base = OTHER; note = guanosine
  modified_base 20: mod_base = OTHER; note = 2'-deoxythymidine
  modified_base 21: mod_base = OTHER; note = 2'-deoxythymidine
  source 1..21: mol_type = other RNA
cagctccaactaccacaagtt

SEQ ID NO: 1447 - RNA, 21 nt, synthetic construct
  modified_base 20..21: mod_base = OTHER; note = thymine
  modified_base 1: mod_base = OTHER; note = cytidine
  modified_base 2: mod_base = cm
  modified_base 3: mod_base = OTHER; note = adenosine
  modified_base 4: mod_base = OTHER; note = guanosine
  modified_base 5: mod_base = OTHER; note = cytidine
  modified_base 6: mod_base = OTHER; note = uridine
  modified_base 7: mod_base = OTHER; note = cytidine
  modified_base 8: mod_base = cm
  modified_base 9: mod_base = OTHER; note = adenosine
  modified_base 10: mod_base = OTHER; note = adenosine
  modified_base 11: mod_base = OTHER; note = cytidine
  modified_base 12: mod_base = um
  modified_base 13: mod_base = OTHER; note = adenosine
  modified_base 14: mod_base = OTHER; note = cytidine
  modified_base 15: mod_base = cm
  modified_base 16: mod_base = OTHER; note = adenosine
  modified_base 17: mod_base = cm
  modified_base 18: mod_base = OTHER; note = adenosine
  modified_base 19: mod_base = OTHER; note = adenosine
  modified_base 20: mod_base = OTHER; note = 2'-deoxythymidine
  modified_base 21: mod_base = OTHER; note = 2'-deoxythymidine
  source 1..21: mol_type = other RNA
ccagctccaactaccacaatt

SEQ ID NO: 1448 - RNA, 21 nt, synthetic construct
  modified_base 20..21: mod_base = OTHER; note = thymine
  modified_base 1: mod_base = OTHER; note = adenosine
  modified_base 2: mod_base = OTHER; note = cytidine
  modified_base 3: mod_base = cm
  modified_base 4: mod_base = OTHER; note = adenosine
  modified_base 5: mod_base = OTHER; note = guanosine
  modified_base 6: mod_base = OTHER; note = cytidine
  modified_base 7: mod_base = OTHER; note = uridine
  modified_base 8: mod_base = OTHER; note = cytidine
  modified_base 9: mod_base = cm
  modified_base 10: mod_base = OTHER; note = adenosine
  modified_base 11: mod_base = OTHER; note = adenosine
  modified_base 12: mod_base = OTHER; note = cytidine
  modified_base 13: mod_base = um
  modified_base 14: mod_base = OTHER; note = adenosine
  modified_base 15: mod_base = OTHER; note = cytidine
  modified_base 16: mod_base = cm
  modified_base 17: mod_base = OTHER; note = adenosine
  modified_base 18: mod_base = cm
  modified_base 19: mod_base = OTHER; note = adenosine
  modified_base 20: mod_base = OTHER; note = 2'-deoxythymidine
  modified_base 21: mod_base = OTHER; note = 2'-deoxythymidine
  source 1..21: mol_type = other RNA
accagctccaactaccacatt

SEQ ID NO: 1449 - RNA, 21 nt, synthetic construct
  modified_base 20..21: mod_base = OTHER; note = thymine
  modified_base 1: mod_base = cm
  modified_base 2: mod_base = OTHER; note = adenosine
  modified_base 3: mod_base = OTHER; note = cytidine
  modified_base 4: mod_base = cm
  modified_base 5: mod_base = OTHER; note = adenosine
  modified_base 6: mod_base = OTHER; note = guanosine
  modified_base 7: mod_base = OTHER; note = cytidine
  modified_base 8: mod_base = OTHER; note = uridine
  modified_base 9: mod_base = OTHER; note = cytidine
  modified_base 10: mod_base = cm
  modified_base 11: mod_base = OTHER; note = adenosine
  modified_base 12: mod_base = OTHER; note = adenosine
  modified_base 13: mod_base = OTHER; note = cytidine
  modified_base 14: mod_base = um
  modified_base 15: mod_base = OTHER; note = adenosine
  modified_base 16: mod_base = OTHER; note = cytidine
  modified_base 17: mod_base = cm
  modified_base 18: mod_base = OTHER; note = adenosine
  modified_base 19: mod_base = OTHER; note = cytidine
  modified_base 20: mod_base = OTHER; note = 2'-deoxythymidine
  modified_base 21: mod_base = OTHER; note = 2'-deoxythymidine
  source 1..21: mol_type = other RNA
caccagctccaactaccactt

SEQ ID NO: 1450 - RNA, 21 nt, synthetic construct
  modified_base 20..21: mod_base = OTHER; note = thymine
  modified_base 1: mod_base = OTHER; note = cytidine
  modified_base 2: mod_base = cm
  modified_base 3: mod_base = OTHER; note = adenosine
  modified_base 4: mod_base = OTHER; note = cytidine
  modified_base 5: mod_base = cm
  modified_base 6: mod_base = OTHER; note = adenosine
  modified_base 7: mod_base = OTHER; note = guanosine
  modified_base 8: mod_base = OTHER; note = cytidine
  modified_base 9: mod_base = OTHER; note = uridine
  modified_base 10: mod_base = OTHER; note = cytidine
  modified_base 11: mod_base = cm
  modified_base 12: mod_base = OTHER; note = adenosine
  modified_base 13: mod_base = OTHER; note = adenosine
  modified_base 14: mod_base = OTHER; note = cytidine
  modified_base 15: mod_base = um
  modified_base 16: mod_base = OTHER; note = adenosine
  modified_base 17: mod_base = OTHER; note = cytidine
  modified_base 18: mod_base = cm
  modified_base 19: mod_base = OTHER; note = adenosine
  modified_base 20: mod_base = OTHER; note = 2'-deoxythymidine
  modified_base 21: mod_base = OTHER; note = 2'-deoxythymidine
  source 1..21: mol_type = other RNA
ccaccagctccaactaccatt

SEQ ID NO: 1451 - RNA, 21 nt, synthetic construct
  modified_base 20..21: mod_base = OTHER; note = thymine
  modified_base 1: mod_base = OTHER; note = guanosine
  modified_base 2: mod_base = OTHER; note = cytidine
  modified_base 3: mod_base = cm
  modified_base 4: mod_base = OTHER; note = adenosine
  modified_base 5: mod_base = OTHER; note = cytidine
  modified_base 6: mod_base = cm
  modified_base 7: mod_base = OTHER; note = adenosine
  modified_base 8: mod_base = OTHER; note = guanosine
  modified_base 9: mod_base = OTHER; note = cytidine
  modified_base 10: mod_base = OTHER; note = uridine
  modified_base 11: mod_base = OTHER; note = cytidine
  modified_base 12: mod_base = cm
  modified_base 13: mod_base = OTHER; note = adenosine
  modified_base 14: mod_base = OTHER; note = adenosine
  modified_base 15: mod_base = OTHER; note = cytidine
  modified_base 16: mod_base = um
  modified_base 17: mod_base = OTHER; note = adenosine
  modified_base 18: mod_base = OTHER; note = cytidine
  modified_base 19: mod_base = OTHER; note = cytidine
  modified_base 20: mod_base = OTHER; note = 2'-deoxythymidine
  modified_base 21: mod_base = OTHER; note = 2'-deoxythymidine
  source 1..21: mol_type = other RNA
gccaccagctccaactacctt

SEQ ID NO: 1452 - RNA, 21 nt, synthetic construct
  modified_base 20..21: mod_base = OTHER; note = thymine
  modified_base 1: mod_base = OTHER; note = cytidine
  modified_base 2: mod_base = OTHER; note = guanosine
  modified_base 3: mod_base = OTHER; note = cytidine
  modified_base 4: mod_base = cm
  modified_base 5: mod_base = OTHER; note = adenosine
  modified_base 6: mod_base = OTHER; note = cytidine
  modified_base 7: mod_base = cm
  modified_base 8: mod_base = OTHER; note = adenosine
  modified_base 9: mod_base = OTHER; note = guanosine
  modified_base 10: mod_base = OTHER; note = cytidine
  modified_base 11: mod_base = OTHER; note = uridine
  modified_base 12: mod_base = OTHER; note = cytidine
  modified_base 13: mod_base = cm
  modified_base 14: mod_base = OTHER; note = adenosine
  modified_base 15: mod_base = OTHER; note = adenosine
  modified_base 16: mod_base = OTHER; note = cytidine
  modified_base 17: mod_base = um
  modified_base 18: mod_base = OTHER; note = adenosine
  modified_base 19: mod_base = OTHER; note = cytidine
  modified_base 20: mod_base = OTHER; note = 2'-deoxythymidine
  modified_base 21: mod_base = OTHER; note = 2'-deoxythymidine
  source 1..21: mol_type = other RNA
cgccaccagctccaactactt

SEQ ID NO: 1453 - RNA, 21 nt, synthetic construct
  modified_base 20..21: mod_base = OTHER; note = thymine
  modified_base 1: mod_base = OTHER; note = adenosine
  modified_base 2: mod_base = OTHER; note = cytidine
  modified_base 3: mod_base = OTHER; note = guanosine
  modified_base 4: mod_base = OTHER; note = cytidine
  modified_base 5: mod_base = cm
  modified_base 6: mod_base = OTHER; note = adenosine
  modified_base 7: mod_base = OTHER; note = cytidine
  modified_base 8: mod_base = cm
  modified_base 9: mod_base = OTHER; note = adenosine
  modified_base 10: mod_base = OTHER; note = guanosine
  modified_base 11: mod_base = OTHER; note = cytidine
  modified_base 12: mod_base = OTHER; note = uridine
  modified_base 13: mod_base = OTHER; note = cytidine
  modified_base 14: mod_base = cm
  modified_base 15: mod_base = OTHER; note = adenosine
  modified_base 16: mod_base = OTHER; note = adenosine
  modified_base 17: mod_base = OTHER; note = cytidine
  modified_base 18: mod_base = um
  modified_base 19: mod_base = OTHER; note = adenosine
  modified_base 20: mod_base = OTHER; note = 2'-deoxythymidine
  modified_base 21: mod_base = OTHER; note = 2'-deoxythymidine
  source 1..21: mol_type = other RNA
acgccaccagctccaactatt

SEQ ID NO: 1454 - RNA, 21 nt, synthetic construct
  modified_base 1: mod_base = um
  modified_base 2: mod_base = OTHER; note = adenosine
  modified_base 3: mod_base = OTHER; note = cytidine
  modified_base 4: mod_base = OTHER; note = guanosine
  modified_base 5: mod_base = OTHER; note = cytidine
  modified_base 6: mod_base = cm
  modified_base 7: mod_base = OTHER; note = adenosine
  modified_base 8: mod_base = OTHER; note = cytidine
  modified_base 9: mod_base = cm
  modified_base 10: mod_base = OTHER; note = adenosine
  modified_base 11: mod_base = OTHER; note = guanosine
  modified_base 12: mod_base = OTHER; note = cytidine
  modified_base 13: mod_base = OTHER; note = uridine
  modified_base 14: mod_base = OTHER; note = cytidine
  modified_base 15: mod_base = cm
  modified_base 16: mod_base = OTHER; note = adenosine
  modified_base 17: mod_base = OTHER; note = adenosine
  modified_base 18: mod_base = OTHER; note = cytidine
  modified_base 19: mod_base = OTHER; note = uridine
  modified_base 20: mod_base = OTHER; note = 2'-deoxythymidine
  modified_base 21: mod_base = OTHER; note = 2'-deoxythymidine
  source 1..21: mol_type = other RNA
  modified_base 20..21: mod_base = OTHER; note = thymine
tacgccaccagctccaacttt

SEQ ID NO: 1455 - RNA, 21 nt, synthetic construct
  modified_base 20..21: mod_base = OTHER; note = thymine
  modified_base 1: mod_base = OTHER; note = cytidine
  modified_base 2: mod_base = um
  modified_base 3: mod_base = OTHER; note = adenosine
  modified_base 4: mod_base = OTHER; note = cytidine
  modified_base 5: mod_base = OTHER; note = guanosine
  modified_base 6: mod_base = OTHER; note = cytidine
  modified_base 7: mod_base = cm
  modified_base 8: mod_base = OTHER; note = adenosine
  modified_base 9: mod_base = OTHER; note = cytidine
  modified_base 10: mod_base = cm
  modified_base 11: mod_base = OTHER; note = adenosine
  modified_base 12: mod_base = OTHER; note = guanosine
  modified_base 13: mod_base = OTHER; note = cytidine
  modified_base 14: mod_base = OTHER; note = uridine
  modified_base 15: mod_base = OTHER; note = cytidine
  modified_base 16: mod_base = cm
  modified_base 17: mod_base = OTHER; note = adenosine
  modified_base 18: mod_base = OTHER; note = adenosine
  modified_base 19: mod_base = OTHER; note = cytidine
  modified_base 20: mod_base = OTHER; note = 2'-deoxythymidine
  modified_base 21: mod_base = OTHER; note = 2'-deoxythymidine
  source 1..21: mol_type = other RNA
ctacgccaccagctccaactt

SEQ ID NO: 1456 - RNA, 21 nt, synthetic construct
  modified_base 20..21: mod_base = OTHER; note = thymine
  modified_base 1: mod_base = OTHER; note = cytidine
  modified_base 2: mod_base = OTHER; note = cytidine
  modified_base 3: mod_base = um
  modified_base 4: mod_base = OTHER; note = adenosine
  modified_base 5: mod_base = OTHER; note = cytidine
  modified_base 6: mod_base = OTHER; note = guanosine
  modified_base 7: mod_base = OTHER; note = cytidine
  modified_base 8: mod_base = cm
  modified_base 9: mod_base = OTHER; note = adenosine
  modified_base 10: mod_base = OTHER; note = cytidine
  modified_base 11: mod_base = cm
  modified_base 12: mod_base = OTHER; note = adenosine
  modified_base 13: mod_base = OTHER; note = guanosine
  modified_base 14: mod_base = OTHER; note = cytidine
  modified_base 15: mod_base = OTHER; note = uridine
  modified_base 16: mod_base = OTHER; note = cytidine
  modified_base 17: mod_base = cm
  modified_base 18: mod_base = OTHER; note = adenosine
  modified_base 19: mod_base = OTHER; note = adenosine
  modified_base 20: mod_base = OTHER; note = 2'-deoxythymidine
  modified_base 21: mod_base = OTHER; note = 2'-deoxythymidine
  source 1..21: mol_type = other RNA
cctacgccaccagctccaatt

SEQ ID NO: 1457 - RNA, 21 nt, synthetic construct
  modified_base 20..21: mod_base = OTHER; note = thymine
  modified_base 1: mod_base = OTHER; note = guanosine
  modified_base 2: mod_base = OTHER; note = cytidine
  modified_base 3: mod_base = OTHER; note = cytidine
  modified_base 4: mod_base = um
  modified_base 5: mod_base = OTHER; note = adenosine
  modified_base 6: mod_base = OTHER; note = cytidine
  modified_base 7: mod_base = OTHER; note = guanosine
  modified_base 8: mod_base = OTHER; note = cytidine
  modified_base 9: mod_base = cm
  modified_base 10: mod_base = OTHER; note = adenosine
  modified_base 11: mod_base = OTHER; note = cytidine
  modified_base 12: mod_base = cm
  modified_base 13: mod_base = OTHER; note = adenosine
  modified_base 14: mod_base = OTHER; note = guanosine
  modified_base 15: mod_base = OTHER; note = cytidine
  modified_base 16: mod_base = OTHER; note = uridine
  modified_base 17: mod_base = OTHER; note = cytidine
  modified_base 18: mod_base = cm
  modified_base 19: mod_base = OTHER; note = adenosine
  modified_base 20: mod_base = OTHER; note = 2'-deoxythymidine
  modified_base 21: mod_base = OTHER; note = 2'-deoxythymidine
  source 1..21: mol_type = other RNA
gcctacgccaccagctccatt

SEQ ID NO: 1458 - RNA, 21 nt, synthetic construct
  modified_base 20..21: mod_base = OTHER; note = thymine
  modified_base 1: mod_base = OTHER; note = uridine
  modified_base 2: mod_base = OTHER; note = guanosine
  modified_base 3: mod_base = OTHER; note = cytidine
  modified_base 4: mod_base = OTHER; note = cytidine
  modified_base 5: mod_base = um
  modified_base 6: mod_base = OTHER; note = adenosine
  modified_base 7: mod_base = OTHER; note = cytidine
  modified_base 8: mod_base = OTHER; note = guanosine
  modified_base 9: mod_base = OTHER; note = cytidine
  modified_base 10: mod_base = cm
  modified_base 11: mod_base = OTHER; note = adenosine
  modified_base 12: mod_base = OTHER; note = cytidine
  modified_base 13: mod_base = cm
  modified_base 14: mod_base = OTHER; note = adenosine
  modified_base 15: mod_base = OTHER; note = guanosine
  modified_base 16: mod_base = OTHER; note = cytidine
  modified_base 17: mod_base = OTHER; note = uridine
  modified_base 18: mod_base = OTHER; note = cytidine
  modified_base 19: mod_base = OTHER; note = cytidine
  modified_base 20: mod_base = OTHER; note = 2'-deoxythymidine
  modified_base 21: mod_base = OTHER; note = 2'-deoxythymidine
  source 1..21: mol_type = other RNA
tgcctacgccaccagctcctt

SEQ ID NO: 1459 - RNA, 21 nt, synthetic construct
  modified_base 20..21: mod_base = OTHER; note = thymine
  modified_base 1: mod_base = OTHER; note = uridine
  modified_base 2: mod_base = OTHER; note = uridine
  modified_base 3: mod_base = OTHER; note = guanosine
  modified_base 4: mod_base = OTHER; note = cytidine
  modified_base 5: mod_base = OTHER; note = cytidine
  modified_base 6: mod_base = um
  modified_base 7: mod_base = OTHER; note = adenosine
  modified_base 8: mod_base = OTHER; note = cytidine
  modified_base 9: mod_base = OTHER; note = guanosine
  modified_base 10: mod_base = OTHER; note = cytidine
  modified_base 11: mod_base = cm
  modified_base 12: mod_base = OTHER; note = adenosine
  modified_base 13: mod_base = OTHER; note = cytidine
  modified_base 14: mod_base = cm
  modified_base 15: mod_base = OTHER; note = adenosine
  modified_base 16: mod_base = OTHER; note = guanosine
  modified_base 17: mod_base = OTHER; note = cytidine
  modified_base 18: mod_base = OTHER; note = uridine
  modified_base 19: mod_base = OTHER; note = cytidine
  modified_base 20: mod_base = OTHER; note = 2'-deoxythymidine
  modified_base 21: mod_base = OTHER; note = 2'-deoxythymidine
  source 1..21: mol_type = other RNA
ttgcctacgccaccagctctt

SEQ ID NO: 1460 - RNA, 21 nt, synthetic construct
  modified_base 20..21: mod_base = OTHER; note = thymine
  modified_base 1: mod_base = OTHER; note = cytidine
  modified_base 2: mod_base = OTHER; note = uridine
  modified_base 3: mod_base = OTHER; note = uridine
  modified_base 4: mod_base = OTHER; note = guanosine
  modified_base 5: mod_base = OTHER; note = cytidine
  modified_base 6: mod_base = OTHER; note = cytidine
  modified_base 7: mod_base = um
  modified_base 8: mod_base = OTHER; note = adenosine
  modified_base 9: mod_base = OTHER; note = cytidine
  modified_base 10: mod_base = OTHER; note = guanosine
  modified_base 11: mod_base = OTHER; note = cytidine
  modified_base 12: mod_base = cm
  modified_base 13: mod_base = OTHER; note = adenosine
  modified_base 14: mod_base = OTHER; note = cytidine
  modified_base 15: mod_base = cm
  modified_base 16: mod_base = OTHER; note = adenosine
  modified_base 17: mod_base = OTHER; note = guanosine
  modified_base 18: mod_base = OTHER; note = cytidine
  modified_base 19: mod_base = OTHER; note = uridine
  modified_base 20: mod_base = OTHER; note = 2'-deoxythymidine
  modified_base 21: mod_base = OTHER; note = 2'-deoxythymidine
  source 1..21: mol_type = other RNA
cttgcctacgccaccagcttt

SEQ ID NO: 1461 - RNA, 21 nt, synthetic construct
  modified_base 20..21: mod_base = OTHER; note = thymine
  modified_base 1: mod_base = OTHER; note = uridine
  modified_base 2: mod_base = OTHER; note = cytidine
  modified_base 3: mod_base = OTHER; note = uridine
  modified_base 4: mod_base = OTHER; note = uridine
  modified_base 5: mod_base = OTHER; note = guanosine
  modified_base 6: mod_base = OTHER; note = cytidine
  modified_base 7: mod_base = OTHER; note = cytidine
  modified_base 8: mod_base = um
  modified_base 9: mod_base = OTHER; note = adenosine
  modified_base 10: mod_base = OTHER; note = cytidine
  modified_base 11: mod_base = OTHER; note = guanosine
  modified_base 12: mod_base = OTHER; note = cytidine
  modified_base 13: mod_base = cm
  modified_base 14: mod_base = OTHER; note = adenosine
  modified_base 15: mod_base = OTHER; note = cytidine
  modified_base 16: mod_base = cm
  modified_base 17: mod_base = OTHER; note = adenosine
  modified_base 18: mod_base = OTHER; note = guanosine
  modified_base 19: mod_base = OTHER; note = cytidine
  modified_base 20: mod_base = OTHER; note = 2'-deoxythymidine
  modified_base 21: mod_base = OTHER; note = 2'-deoxythymidine
  source 1..21: mol_type = other RNA
tcttgcctacgccaccagctt

SEQ ID NO: 1462 - RNA, 21 nt, synthetic construct
  modified_base 20..21: mod_base = OTHER; note = thymine
  modified_base 1: mod_base = OTHER; note = cytidine
  modified_base 2: mod_base = OTHER; note = uridine
  modified_base 3: mod_base = OTHER; note = cytidine
  modified_base 4: mod_base = OTHER; note = uridine
  modified_base 5: mod_base = OTHER; note = uridine
  modified_base 6: mod_base = OTHER; note = guanosine
  modified_base 7: mod_base = OTHER; note = cytidine
  modified_base 8: mod_base = OTHER; note = cytidine
  modified_base 9: mod_base = um
  modified_base 10: mod_base = OTHER; note = adenosine
  modified_base 11: mod_base = OTHER; note = cytidine
  modified_base 12: mod_base = OTHER; note = guanosine
  modified_base 13: mod_base = OTHER; note = cytidine
  modified_base 14: mod_base = cm
  modified_base 15: mod_base = OTHER; note = adenosine
  modified_base 16: mod_base = OTHER; note = cytidine
  modified_base 17: mod_base = cm
  modified_base 18: mod_base = OTHER; note = adenosine
  modified_base 19: mod_base = OTHER; note = guanosine
  modified_base 20: mod_base = OTHER; note = 2'-deoxythymidine
  modified_base 21: mod_base = OTHER; note = 2'-deoxythymidine
  source 1..21: mol_type = other RNA
ctcttgcctacgccaccagtt

SEQ ID NO: 1463 - RNA, 21 nt, synthetic construct
  modified_base 20..21: mod_base = OTHER; note = thymine
  modified_base 1: mod_base = OTHER; note = adenosine
  modified_base 2: mod_base = OTHER; note = cytidine
  modified_base 3: mod_base = OTHER; note = uridine
  modified_base 4: mod_base = OTHER; note = cytidine
  modified_base 5: mod_base = OTHER; note = uridine
  modified_base 6: mod_base = OTHER; note = uridine
  modified_base 7: mod_base = OTHER; note = guanosine
  modified_base 8: mod_base = OTHER; note = cytidine
  modified_base 9: mod_base = OTHER; note = cytidine
  modified_base 10: mod_base = um
  modified_base 11: mod_base = OTHER; note = adenosine
  modified_base 12: mod_base = OTHER; note = cytidine
  modified_base 13: mod_base = OTHER; note = guanosine
  modified_base 14: mod_base = OTHER; note = cytidine
  modified_base 15: mod_base = cm
  modified_base 16: mod_base = OTHER; note = adenosine
  modified_base 17: mod_base = OTHER; note = cytidine
  modified_base 18: mod_base = cm
  modified_base 19: mod_base = OTHER; note = adenosine
  modified_base 20: mod_base = OTHER; note = 2'-deoxythymidine
  modified_base 21: mod_base = OTHER; note = 2'-deoxythymidine
  source 1..21: mol_type = other RNA
actcttgcctacgccaccatt

SEQ ID NO: 1464 - RNA, 21 nt, synthetic construct
  modified_base 20..21: mod_base = OTHER; note = thymine
  modified_base 1: mod_base = cm
  modified_base 2: mod_base = OTHER; note = adenosine
  modified_base 3: mod_base = OTHER; note = cytidine
  modified_base 4: mod_base = OTHER; note = uridine
  modified_base 5: mod_base = OTHER; note = cytidine
  modified_base 6: mod_base = OTHER; note = uridine
  modified_base 7: mod_base = OTHER; note = uridine
  modified_base 8: mod_base = OTHER; note = guanosine
  modified_base 9: mod_base = OTHER; note = cytidine
  modified_base 10: mod_base = OTHER; note = cytidine
  modified_base 11: mod_base = um
  modified_base 12: mod_base = OTHER; note = adenosine
  modified_base 13: mod_base = OTHER; note = cytidine
  modified_base 14: mod_base = OTHER; note = guanosine
  modified_base 15: mod_base = OTHER; note = cytidine
  modified_base 16: mod_base = cm
  modified_base 17: mod_base = OTHER; note = adenosine
  modified_base 18: mod_base = OTHER; note = cytidine
  modified_base 19: mod_base = OTHER; note = cytidine
  modified_base 20: mod_base = OTHER; note = 2'-deoxythymidine
  modified_base 21: mod_base = OTHER; note = 2'-deoxythymidine
  source 1..21: mol_type = other RNA
cactcttgcctacgccacctt

SEQ ID NO: 1465 - RNA, 21 nt, synthetic construct
  modified_base 20..21: mod_base = OTHER; note = thymine
  modified_base 1: mod_base = OTHER; note = guanosine
  modified_base 2: mod_base = cm
  modified_base 3: mod_base = OTHER; note = adenosine
  modified_base 4: mod_base = OTHER; note = cytidine
  modified_base 5: mod_base = OTHER; note = uridine
  modified_base 6: mod_base = OTHER; note = cytidine
  modified_base 7: mod_base = OTHER; note = uridine
  modified_base 8: mod_base = OTHER; note = uridine
  modified_base 9: mod_base = OTHER; note = guanosine
  modified_base 10: mod_base = OTHER; note = cytidine
  modified_base 11: mod_base = OTHER; note = cytidine
  modified_base 12: mod_base = um
  modified_base 13: mod_base = OTHER; note = adenosine
  modified_base 14: mod_base = OTHER; note = cytidine
  modified_base 15: mod_base = OTHER; note = guanosine
  modified_base 16: mod_base = OTHER; note = cytidine
  modified_base 17: mod_base = cm
  modified_base 18: mod_base = OTHER; note = adenosine
  modified_base 19: mod_base = OTHER; note = cytidine
  modified_base 20: mod_base = OTHER; note = 2'-deoxythymidine
  modified_base 21: mod_base = OTHER; note = 2'-deoxythymidine
  source 1..21: mol_type = other RNA
gcactcttgcctacgccactt

SEQ ID NO: 1466 - RNA, 21 nt, synthetic construct
  modified_base 20..21: mod_base = OTHER; note = thymine
  modified_base 1: mod_base = OTHER; note = guanosine
  modified_base 2: mod_base = OTHER; note = guanosine
  modified_base 3: mod_base = cm
  modified_base 4: mod_base = OTHER; note = adenosine
  modified_base 5: mod_base = OTHER; note = cytidine
  modified_base 6: mod_base = OTHER; note = uridine
  modified_base 7: mod_base = OTHER; note = cytidine
  modified_base 8: mod_base = OTHER; note = uridine
  modified_base 9: mod_base = OTHER; note = uridine
  modified_base 10: mod_base = OTHER; note = guanosine
  modified_base 11: mod_base = OTHER; note = cytidine
  modified_base 12: mod_base = OTHER; note = cytidine
  modified_base 13: mod_base = um
  modified_base 14: mod_base = OTHER; note = adenosine
  modified_base 15: mod_base = OTHER; note = cytidine
  modified_base 16: mod_base = OTHER; note = guanosine
  modified_base 17: mod_base = OTHER; note = cytidine
  modified_base 18: mod_base = cm
  modified_base 19: mod_base = OTHER; note = adenosine
  modified_base 20: mod_base = OTHER; note = 2'-deoxythymidine
  modified_base 21: mod_base = OTHER; note = 2'-deoxythymidine
  source 1..21: mol_type = other RNA
ggcactcttgcctacgccatt

SEQ ID NO: 1467 - RNA, 21 nt, synthetic construct
  modified_base 20..21: mod_base = OTHER; note = thymine
  modified_base 1: mod_base = OTHER; note = adenosine
  modified_base 2: mod_base = OTHER; note = guanosine
  modified_base 3: mod_base = OTHER; note = guanosine
  modified_base 4: mod_base = cm
  modified_base 5: mod_base = OTHER; note = adenosine
  modified_base 6: mod_base = OTHER; note = cytidine
  modified_base 7: mod_base = OTHER; note = uridine
  modified_base 8: mod_base = OTHER; note = cytidine
  modified_base 9: mod_base = OTHER; note = uridine
  modified_base 10: mod_base = OTHER; note = uridine
  modified_base 11: mod_base = OTHER; note = guanosine
  modified_base 12: mod_base = OTHER; note = cytidine
  modified_base 13: mod_base = OTHER; note = cytidine
  modified_base 14: mod_base = um
  modified_base 15: mod_base = OTHER; note = adenosine
  modified_base 16: mod_base = OTHER; note = cytidine
  modified_base 17: mod_base = OTHER; note = guanosine
  modified_base 18: mod_base = OTHER; note = cytidine
  modified_base 19: mod_base = OTHER; note = cytidine
  modified_base 20: mod_base = OTHER; note = 2'-deoxythymidine
  modified_base 21: mod_base = OTHER; note = 2'-deoxythymidine
  source 1..21: mol_type = other RNA
aggcactcttgcctacgcctt

SEQ ID NO: 1468 - RNA, 21 nt, synthetic construct
  modified_base 20..21: mod_base = OTHER; note = thymine
  modified_base 1: mod_base = OTHER; note = adenosine
  modified_base 2: mod_base = OTHER; note = adenosine
  modified_base 3: mod_base = OTHER; note = guanosine
  modified_base 4: mod_base = OTHER; note = guanosine
  modified_base 5: mod_base = cm
  modified_base 6: mod_base = OTHER; note = adenosine
  modified_base 7: mod_base = OTHER; note = cytidine
  modified_base 8: mod_base = OTHER; note = uridine
  modified_base 9: mod_base = OTHER; note = cytidine
  modified_base 10: mod_base = OTHER; note = uridine
  modified_base 11: mod_base = OTHER; note = uridine
  modified_base 12: mod_base = OTHER; note = guanosine
  modified_base 13: mod_base = OTHER; note = cytidine
  modified_base 14: mod_base = OTHER; note = cytidine
  modified_base 15: mod_base = um
  modified_base 16: mod_base = OTHER; note = adenosine
  modified_base 17: mod_base = OTHER; note = cytidine
  modified_base 18: mod_base = OTHER; note = guanosine
  modified_base 19: mod_base = OTHER; note = cytidine
  modified_base 20: mod_base = OTHER; note = 2'-deoxythymidine
  modified_base 21: mod_base = OTHER; note = 2'-deoxythymidine
  source 1..21: mol_type = other RNA
aaggcactcttgcctacgctt

SEQ ID NO: 1469 - RNA, 21 nt, synthetic construct
  modified_base 20..21: mod_base = OTHER; note = thymine
  modified_base 1: mod_base = cm
  modified_base 2: mod_base = OTHER; note = adenosine
  modified_base 3: mod_base = OTHER; note = adenosine
  modified_base 4: mod_base = OTHER; note = guanosine
  modified_base 5: mod_base = OTHER; note = guanosine
  modified_base 6: mod_base = cm
  modified_base 7: mod_base = OTHER; note = adenosine
  modified_base 8: mod_base = OTHER; note = cytidine
  modified_base 9: mod_base = OTHER; note = uridine
  modified_base 10: mod_base = OTHER; note = cytidine
  modified_base 11: mod_base = OTHER; note = uridine
  modified_base 12: mod_base = OTHER; note = uridine
  modified_base 13: mod_base = OTHER; note = guanosine
  modified_base 14: mod_base = OTHER; note = cytidine
  modified_base 15: mod_base = OTHER; note = cytidine
  modified_base 16: mod_base = um
  modified_base 17: mod_base = OTHER; note = adenosine
  modified_base 18: mod_base = OTHER; note = cytidine
  modified_base 19: mod_base = OTHER; note = guanosine
  modified_base 20: mod_base = OTHER; note = 2'-deoxythymidine
  modified_base 21: mod_base = OTHER; note = 2'-deoxythymidine
  source 1..21: mol_type = other RNA
caaggcactcttgcctacgtt

SEQ ID NO: 1470 - RNA, 21 nt, synthetic construct
  modified_base 20..21: mod_base = OTHER; note = thymine
  modified_base 1: mod_base = OTHER; note = uridine
  modified_base 2: mod_base = cm
  modified_base 3: mod_base = OTHER; note = adenosine
  modified_base 4: mod_base = OTHER; note = adenosine
  modified_base 5: mod_base = OTHER; note = guanosine
  modified_base 6: mod_base = OTHER; note = guanosine
  modified_base 7: mod_base = cm
  modified_base 8: mod_base = OTHER; note = adenosine
  modified_base 9: mod_base = OTHER; note = cytidine
  modified_base 10: mod_base = OTHER; note = uridine
  modified_base 11: mod_base = OTHER; note = cytidine
  modified_base 12: mod_base = OTHER; note = uridine
  modified_base 13: mod_base = OTHER; note = uridine
  modified_base 14: mod_base = OTHER; note = guanosine
  modified_base 15: mod_base = OTHER; note = cytidine
  modified_base 16: mod_base = OTHER; note = cytidine
  modified_base 17: mod_base = um
  modified_base 18: mod_base = OTHER; note = adenosine
  modified_base 19: mod_base = OTHER; note = cytidine
  modified_base 20: mod_base = OTHER; note = 2'-deoxythymidine
  modified_base 21: mod_base = OTHER; note = 2'-deoxythymidine
  source 1..21: mol_type = other RNA
tcaaggcactcttgcctactt

SEQ ID NO: 1471 - RNA, 21 nt, synthetic construct
  modified_base 20..21: mod_base = OTHER; note = thymine
  modified_base 1: mod_base = OTHER; note = guanosine
  modified_base 2: mod_base = OTHER; note = uridine
  modified_base 3: mod_base = cm
  modified_base 4: mod_base = OTHER; note = adenosine
  modified_base 5: mod_base = OTHER; note = adenosine
  modified_base 6: mod_base = OTHER; note = guanosine
  modified_base 7: mod_base = OTHER; note = guanosine
  modified_base 8: mod_base = cm
  modified_base 9: mod_base = OTHER; note = adenosine
  modified_base 10: mod_base = OTHER; note = cytidine
  modified_base 11: mod_base = OTHER; note = uridine
  modified_base 12: mod_base = OTHER; note = cytidine
  modified_base 13: mod_base = OTHER; note = uridine
  modified_base 14: mod_base = OTHER; note = uridine
  modified_base 15: mod_base = OTHER; note = guanosine
  modified_base 16: mod_base = OTHER; note = cytidine
  modified_base 17: mod_base = OTHER; note = cytidine
  modified_base 18: mod_base = um
  modified_base 19: mod_base = OTHER; note = adenosine
  modified_base 20: mod_base = OTHER; note = 2'-deoxythymidine
  modified_base 21: mod_base = OTHER; note = 2'-deoxythymidine
  source 1..21: mol_type = other RNA
gtcaaggcactcttgcctatt

SEQ ID NO: 1472 - DNA, 21 bp, synthetic construct
  modified_base 1: mod_base = OTHER; note = cytidine
  modified_base 2: mod_base = OTHER; note = guanosine
  modified_base 3: mod_base = OTHER; note = uridine
  modified_base 4: mod_base = cm
  modified_base 5: mod_base = OTHER; note = adenosine
  modified_base 6: mod_base = OTHER; note = adenosine
  modified_base 7: mod_base = OTHER; note = guanosine
  modified_base 8: mod_base = OTHER; note = guanosine
  modified_base 9: mod_base = cm
  modified_base 10: mod_base = OTHER; note = adenosine
  modified_base 11: mod_base = OTHER; note = cytidine
  modified_base 12: mod_base = OTHER; note = uridine
  modified_base 13: mod_base = OTHER; note = cytidine
  modified_base 14: mod_base = OTHER; note = uridine
  modified_base 15: mod_base = OTHER; note = uridine
  modified_base 16: mod_base = OTHER; note = guanosine
  modified_base 17: mod_base = OTHER; note = cytidine
  modified_base 18: mod_base = OTHER; note = cytidine
  modified_base 19: mod_base = OTHER; note = uridine
  modified_base 20: mod_base = OTHER; note = 2'-deoxythymidine
  modified_base 21: mod_base = OTHER; note = 2'-deoxythymidine
  source 1..21: mol_type = other DNA
cgtcaaggcactcttgccttt

SEQ ID NO: 1473 - DNA, 21 bp, synthetic construct
  modified_base 1: mod_base = OTHER; note = uridine
  modified_base 2: mod_base = OTHER; note = cytidine
  modified_base 3: mod_base = OTHER; note = guanosine
  modified_base 4: mod_base = OTHER; note = uridine
  modified_base 5: mod_base = cm
  modified_base 6: mod_base = OTHER; note = adenosine
  modified_base 7: mod_base = OTHER; note = adenosine
  modified_base 8: mod_base = OTHER; note = guanosine
  modified_base 9: mod_base = OTHER; note = guanosine
  modified_base 10: mod_base = cm
  modified_base 11: mod_base = OTHER; note = adenosine
  modified_base 12: mod_base = OTHER; note = cytidine
  modified_base 13: mod_base = OTHER; note = uridine
  modified_base 14: mod_base = OTHER; note = cytidine
  modified_base 15: mod_base = OTHER; note = uridine
  modified_base 16: mod_base = OTHER; note = uridine
  modified_base 17: mod_base = OTHER; note = guanosine
  modified_base 18: mod_base = OTHER; note = cytidine
  modified_base 19: mod_base = OTHER; note = cytidine
  modified_base 20: mod_base = OTHER; note = 2'-deoxythymidine
  modified_base 21: mod_base = OTHER; note = 2'-deoxythymidine
  source 1..21: mol_type = other DNA
tcgtcaaggcactcttgcctt

SEQ ID NO: 1474 - DNA, 21 bp, synthetic construct
  modified_base 1: mod_base = OTHER; note = adenosine
  modified_base 2: mod_base = OTHER; note = uridine
  modified_base 3: mod_base = OTHER; note = cytidine
  modified_base 4: mod_base = OTHER; note = guanosine
  modified_base 5: mod_base = OTHER; note = uridine
  modified_base 6: mod_base = cm
  modified_base 7: mod_base = OTHER; note = adenosine
  modified_base 8: mod_base = OTHER; note = adenosine
  modified_base 9: mod_base = OTHER; note = guanosine
  modified_base 10: mod_base = OTHER; note = guanosine
  modified_base 11: mod_base = cm
  modified_base 12: mod_base = OTHER; note = adenosine
  modified_base 13: mod_base = OTHER; note = cytidine
  modified_base 14: mod_base = OTHER; note = uridine
  modified_base 15: mod_base = OTHER; note = cytidine
  modified_base 16: mod_base = OTHER; note = uridine
  modified_base 17: mod_base = OTHER; note = uridine
  modified_base 18: mod_base = OTHER; note = guanosine
  modified_base 19: mod_base = OTHER; note = cytidine
  modified_base 20: mod_base = OTHER; note = 2'-deoxythymidine
  modified_base 21: mod_base = OTHER; note = 2'-deoxythymidine
  source 1..21: mol_type = other DNA
atcgtcaaggcactcttgctt

SEQ ID NO: 1475 - RNA, 21 nt, synthetic construct
  modified_base 20..21: mod_base = OTHER; note = thymine
  modified_base 1: mod_base = um
  modified_base 2: mod_base = OTHER; note = adenosine
  modified_base 3: mod_base = OTHER; note = uridine
  modified_base 4: mod_base = OTHER; note = cytidine
  modified_base 5: mod_base = OTHER; note = guanosine
  modified_base 6: mod_base = OTHER; note = uridine
  modified_base 7: mod_base = cm
  modified_base 8: mod_base = OTHER; note = adenosine
  modified_base 9: mod_base = OTHER; note = adenosine
  modified_base 10: mod_base = OTHER; note = guanosine
  modified_base 11: mod_base = OTHER; note = guanosine
  modified_base 12: mod_base = cm
  modified_base 13: mod_base = OTHER; note = adenosine
  modified_base 14: mod_base = OTHER; note = cytidine
  modified_base 15: mod_base = OTHER; note = uridine
  modified_base 16: mod_base = OTHER; note = cytidine
  modified_base 17: mod_base = OTHER; note = uridine
  modified_base 18: mod_base = OTHER; note = uridine
  modified_base 19: mod_base = OTHER; note = guanosine
  modified_base 20: mod_base = OTHER; note = 2'-deoxythymidine
  modified_base 21: mod_base = OTHER; note = 2'-deoxythymidine
  source 1..21: mol_type = other RNA
tatcgtcaaggcactcttgtt

SEQ ID NO: 1476 - RNA, 21 nt, synthetic construct
  modified_base 20..21: mod_base = OTHER; note = thymine
  modified_base 1: mod_base = OTHER; note = guanosine
  modified_base 2: mod_base = um
  modified_base 3: mod_base = OTHER; note = adenosine
  modified_base 4: mod_base = OTHER; note = uridine
  modified_base 5: mod_base = OTHER; note = cytidine
  modified_base 6: mod_base = OTHER; note = guanosine
  modified_base 7: mod_base = OTHER; note = uridine
  modified_base 8: mod_base = cm
  modified_base 9: mod_base = OTHER; note = adenosine
  modified_base 10: mod_base = OTHER; note = adenosine
  modified_base 11: mod_base = OTHER; note = guanosine
  modified_base 12: mod_base = OTHER; note = guanosine
  modified_base 13: mod_base = cm
  modified_base 14: mod_base = OTHER; note = adenosine
  modified_base 15: mod_base = OTHER; note = cytidine
  modified_base 16: mod_base = OTHER; note = uridine
  modified_base 17: mod_base = OTHER; note = cytidine
  modified_base 18: mod_base = OTHER; note = uridine
  modified_base 19: mod_base = OTHER; note = uridine
  modified_base 20: mod_base = OTHER; note = 2'-deoxythymidine
  modified_base 21: mod_base = OTHER; note = 2'-deoxythymidine
  source 1..21: mol_type = other RNA
gtatcgtcaaggcactctttt

SEQ ID NO: 1477 - RNA, 21 nt, synthetic construct
  modified_base 20..21: mod_base = OTHER; note = thymine
  modified_base 1: mod_base = OTHER; note = uridine
  modified_base 2: mod_base = OTHER; note = guanosine
  modified_base 3: mod_base = um
  modified_base 4: mod_base = OTHER; note = adenosine
  modified_base 5: mod_base = OTHER; note = uridine
  modified_base 6: mod_base = OTHER; note = cytidine
  modified_base 7: mod_base = OTHER; note = guanosine
  modified_base 8: mod_base = OTHER; note = uridine
  modified_base 9: mod_base = cm
  modified_base 10: mod_base = OTHER; note = adenosine
  modified_base 11: mod_base = OTHER; note = adenosine
  modified_base 12: mod_base = OTHER; note = guanosine
  modified_base 13: mod_base = OTHER; note = guanosine
  modified_base 14: mod_base = cm
  modified_base 15: mod_base = OTHER; note = adenosine
  modified_base 16: mod_base = OTHER; note = cytidine
  modified_base 17: mod_base = OTHER; note = uridine
  modified_base 18: mod_base = OTHER; note = cytidine
  modified_base 19: mod_base = OTHER; note = uridine
  modified_base 20: mod_base = OTHER; note = 2'-deoxythymidine
  modified_base 21: mod_base = OTHER; note = 2'-deoxythymidine
  source 1..21: mol_type = other RNA
tgtatcgtcaaggcactcttt

SEQ ID NO: 1478 - RNA, 21 nt, synthetic construct
  modified_base 20..21: mod_base = OTHER; note = thymine
  modified_base 1: mod_base = OTHER; note = cytidine
  modified_base 2: mod_base = OTHER; note = uridine
  modified_base 3: mod_base = OTHER; note = guanosine
  modified_base 4: mod_base = um
  modified_base 5: mod_base = OTHER; note = adenosine
  modified_base 6: mod_base = OTHER; note = uridine
  modified_base 7: mod_base = OTHER; note = cytidine
  modified_base 8: mod_base = OTHER; note = guanosine
  modified_base 9: mod_base = OTHER; note = uridine
  modified_base 10: mod_base = cm
  modified_base 11: mod_base = OTHER; note = adenosine
  modified_base 12: mod_base = OTHER; note = adenosine
  modified_base 13: mod_base = OTHER; note = guanosine
  modified_base 14: mod_base = OTHER; note = guanosine
  modified_base 15: mod_base = cm
  modified_base 16: mod_base = OTHER; note = adenosine
  modified_base 17: mod_base = OTHER; note = cytidine
  modified_base 18: mod_base = OTHER; note = uridine
  modified_base 19: mod_base = OTHER; note = cytidine
  modified_base 20: mod_base = OTHER; note = 2'-deoxythymidine
  modified_base 21: mod_base = OTHER; note = 2'-deoxythymidine
  source 1..21: mol_type = other RNA
ctgtatcgtcaaggcactctt

SEQ ID NO: 1479 - RNA, 21 nt, synthetic construct
  modified_base 20..21: mod_base = OTHER; note = thymine
  modified_base 1: mod_base = OTHER; note = guanosine
  modified_base 2: mod_base = OTHER; note = cytidine
  modified_base 3: mod_base = OTHER; note = uridine
  modified_base 4: mod_base = OTHER; note = guanosine
  modified_base 5: mod_base = um
  modified_base 6: mod_base = OTHER; note = adenosine
  modified_base 7: mod_base = OTHER; note = uridine
  modified_base 8: mod_base = OTHER; note = cytidine
  modified_base 9: mod_base = OTHER; note = guanosine
  modified_base 10: mod_base = OTHER; note = uridine
  modified_base 11: mod_base = cm
  modified_base 12: mod_base = OTHER; note = adenosine
  modified_base 13: mod_base = OTHER; note = adenosine
  modified_base 14: mod_base = OTHER; note = guanosine
  modified_base 15: mod_base = OTHER; note = guanosine
  modified_base 16: mod_base = cm
  modified_base 17: mod_base = OTHER; note = adenosine
  modified_base 18: mod_base = OTHER; note = cytidine
  modified_base 19: mod_base = OTHER; note = uridine
  modified_base 20: mod_base = OTHER; note = 2'-deoxythymidine
  modified_base 21: mod_base = OTHER; note = 2'-deoxythymidine
  source 1..21: mol_type = other RNA
gctgtatcgtcaaggcacttt

SEQ ID NO: 1480 - RNA, 21 nt, synthetic construct
  modified_base 20..21: mod_base = OTHER; note = thymine
  modified_base 1: mod_base = OTHER; note = adenosine
  modified_base 2: mod_base = OTHER; note = guanosine
  modified_base 3: mod_base = OTHER; note = cytidine
  modified_base 4: mod_base = OTHER; note = uridine
  modified_base 5: mod_base = OTHER; note = guanosine
  modified_base 6: mod_base = um
  modified_base 7: mod_base = OTHER; note = adenosine
  modified_base 8: mod_base = OTHER; note = uridine
  modified_base 9: mod_base = OTHER; note = cytidine
  modified_base 10: mod_base = OTHER; note = guanosine
  modified_base 11: mod_base = OTHER; note = uridine
  modified_base 12: mod_base = cm
  modified_base 13: mod_base = OTHER; note = adenosine
  modified_base 14: mod_base = OTHER; note = adenosine
  modified_base 15: mod_base = OTHER; note = guanosine
  modified_base 16: mod_base = OTHER; note = guanosine
  modified_base 17: mod_base = cm
  modified_base 18: mod_base = OTHER; note = adenosine
  modified_base 19: mod_base = OTHER; note = cytidine
  modified_base 20: mod_base = OTHER; note = 2'-deoxythymidine
  modified_base 21: mod_base = OTHER; note = 2'-deoxythymidine
  source 1..21: mol_type = other RNA
agctgtatcgtcaaggcactt

SEQ ID NO: 1481 - RNA, 21 nt, synthetic construct
  modified_base 20..21: mod_base = OTHER; note = thymine
  modified_base 1: mod_base = um
  modified_base 2: mod_base = OTHER; note = adenosine
  modified_base 3: mod_base = OTHER; note = guanosine
  modified_base 4: mod_base = OTHER; note = cytidine
  modified_base 5: mod_base = OTHER; note = uridine
  modified_base 6: mod_base = OTHER; note = guanosine
  modified_base 7: mod_base = um
  modified_base 8: mod_base = OTHER; note = adenosine
  modified_base 9: mod_base = OTHER; note = uridine
  modified_base 10: mod_base = OTHER; note = cytidine
  modified_base 11: mod_base = OTHER; note = guanosine
  modified_base 12: mod_base = OTHER; note = uridine
  modified_base 13: mod_base = cm
  modified_base 14: mod_base = OTHER; note = adenosine
  modified_base 15: mod_base = OTHER; note = adenosine
  modified_base 16: mod_base = OTHER; note = guanosine
  modified_base 17: mod_base = OTHER; note = guanosine
  modified_base 18: mod_base = cm
  modified_base 19: mod_base = OTHER; note = adenosine
  modified_base 20: mod_base = OTHER; note = 2'-deoxythymidine
  modified_base 21: mod_base = OTHER; note = 2'-deoxythymidine
  source 1..21: mol_type = other RNA
tagctgtatcgtcaaggcatt

SEQ ID NO: 1482 - RNA, 21 nt, synthetic construct
  modified_base 20..21: mod_base = OTHER; note = thymine
  modified_base 1: mod_base = OTHER; note = uridine
  modified_base 2: mod_base = um
  modified_base 3: mod_base = OTHER; note = adenosine
  modified_base 4: mod_base = OTHER; note = guanosine
  modified_base 5: mod_base = OTHER; note = cytidine
  modified_base 6: mod_base = OTHER; note = uridine
  modified_base 7: mod_base = OTHER; note = guanosine
  modified_base 8: mod_base = um
  modified_base 9: mod_base = OTHER; note = adenosine
  modified_base 10: mod_base = OTHER; note = uridine
  modified_base 11: mod_base = OTHER; note = cytidine
  modified_base 12: mod_base = OTHER; note = guanosine
  modified_base 13: mod_base = OTHER; note = uridine
  modified_base 14: mod_base = cm
  modified_base 15: mod_base = OTHER; note = adenosine
  modified_base 16: mod_base = OTHER; note = adenosine
  modified_base 17: mod_base = OTHER; note = guanosine
  modified_base 18: mod_base = OTHER; note = guanosine
  modified_base 19: mod_base = OTHER; note = cytidine
  modified_base 20: mod_base = OTHER; note = 2'-deoxythymidine
  modified_base 21: mod_base = OTHER; note = 2'-deoxythymidine
  source 1..21: mol_type = other RNA
ttagctgtatcgtcaaggctt

SEQ ID NO: 1483 - RNA, 21 nt, synthetic construct
  modified_base 20..21: mod_base = OTHER; note = thymine
  modified_base 1: mod_base = OTHER; note = adenosine
  modified_base 2: mod_base = OTHER; note = uridine
  modified_base 3: mod_base = um
  modified_base 4: mod_base = OTHER; note = adenosine
  modified_base 5: mod_base = OTHER; note = guanosine
  modified_base 6: mod_base = OTHER; note = cytidine
  modified_base 7: mod_base = OTHER; note = uridine
  modified_base 8: mod_base = OTHER; note = guanosine
  modified_base 9: mod_base = um
  modified_base 10: mod_base = OTHER; note = adenosine
  modified_base 11: mod_base = OTHER; note = uridine
  modified_base 12: mod_base = OTHER; note = cytidine
  modified_base 13: mod_base = OTHER; note = guanosine
  modified_base 14: mod_base = OTHER; note = uridine
  modified_base 15: mod_base = cm
  modified_base 16: mod_base = OTHER; note = adenosine
  modified_base 17: mod_base = OTHER; note = adenosine
  modified_base 18: mod_base = OTHER; note = guanosine
  modified_base 19: mod_base = OTHER; note = guanosine
  modified_base 20: mod_base = OTHER; note = 2'-deoxythymidine
  modified_base 21: mod_base = OTHER; note = 2'-deoxythymidine
  source 1..21: mol_type = other RNA
attagctgtatcgtcaaggtt

SEQ ID NO: 1484 - RNA, 21 nt, synthetic construct
  modified_base 20..21: mod_base = OTHER; note = thymine
  modified_base 1: mod_base = OTHER; note = adenosine
  modified_base 2: mod_base = OTHER; note = adenosine
  modified_base 3: mod_base = OTHER; note = uridine
  modified_base 4: mod_base = um
  modified_base 5: mod_base = OTHER; note = adenosine
  modified_base 6: mod_base = OTHER; note = guanosine
  modified_base 7: mod_base = OTHER; note = cytidine
  modified_base 8: mod_base = OTHER; note = uridine
  modified_base 9: mod_base = OTHER; note = guanosine
  modified_base 10: mod_base = um
  modified_base 11: mod_base = OTHER; note = adenosine
  modified_base 12: mod_base = OTHER; note = uridine
  modified_base 13: mod_base = OTHER; note = cytidine
  modified_base 14: mod_base = OTHER; note = guanosine
  modified_base 15: mod_base = OTHER; note = uridine
  modified_base 16: mod_base = cm
  modified_base 17: mod_base = OTHER; note = adenosine
  modified_base 18: mod_base = OTHER; note = adenosine
  modified_base 19: mod_base = OTHER; note = guanosine
  modified_base 20: mod_base = OTHER; note = 2'-deoxythymidine
  modified_base 21: mod_base = OTHER; note = 2'-deoxythymidine
  source 1..21: mol_type = other RNA
aattagctgtatcgtcaagtt

SEQ ID NO: 1485 - RNA, 21 nt, synthetic construct
  modified_base 20..21: mod_base = OTHER; note = thymine
  modified_base 1: mod_base = OTHER; note = guanosine
  modified_base 2: mod_base = OTHER; note = adenosine
  modified_base 3: mod_base = OTHER; note = adenosine
  modified_base 4: mod_base = OTHER; note = uridine
  modified_base 5: mod_base = um
  modified_base 6: mod_base = OTHER; note = adenosine
  modified_base 7: mod_base = OTHER; note = guanosine
  modified_base 8: mod_base = OTHER; note = cytidine
  modified_base 9: mod_base = OTHER; note = uridine
  modified_base 10: mod_base = OTHER; note = guanosine
  modified_base 11: mod_base = um
  modified_base 12: mod_base = OTHER; note = adenosine
  modified_base 13: mod_base = OTHER; note = uridine
  modified_base 14: mod_base = OTHER; note = cytidine
  modified_base 15: mod_base = OTHER; note = guanosine
  modified_base 16: mod_base = OTHER; note = uridine
  modified_base 17: mod_base = cm
  modified_base 18: mod_base = OTHER; note = adenosine
  modified_base 19: mod_base = OTHER; note = adenosine
  modified_base 20: mod_base = OTHER; note = 2'-deoxythymidine
  modified_base 21: mod_base = OTHER; note = 2'-deoxythymidine
  source 1..21: mol_type = other RNA
gaattagctgtatcgtcaatt

SEQ ID NO: 1486 - RNA, 21 nt, synthetic construct
  modified_base 20..21: mod_base = OTHER; note = thymine
  modified_base 1: mod_base = OTHER; note = uridine
  modified_base 2: mod_base = OTHER; note = guanosine
  modified_base 3: mod_base = OTHER; note = adenosine
  modified_base 4: mod_base = OTHER; note = adenosine
  modified_base 5: mod_base = OTHER; note = uridine
  modified_base 6: mod_base = um
  modified_base 7: mod_base = OTHER; note = adenosine
  modified_base 8: mod_base = OTHER; note = guanosine
  modified_base 9: mod_base = OTHER; note = cytidine
  modified_base 10: mod_base = OTHER; note = uridine
  modified_base 11: mod_base = OTHER; note = guanosine
  modified_base 12: mod_base = um
  modified_base 13: mod_base = OTHER; note = adenosine
  modified_base 14: mod_base = OTHER; note = uridine
  modified_base 15: mod_base = OTHER; note = cytidine
  modified_base 16: mod_base = OTHER; note = guanosine
  modified_base 17: mod_base = OTHER; note = uridine
  modified_base 18: mod_base = cm
  modified_base 19: mod_base = OTHER; note = adenosine
  modified_base 20: mod_base = OTHER; note = 2'-deoxythymidine
  modified_base 21: mod_base = OTHER; note = 2'-deoxythymidine
  source 1..21: mol_type = other RNA
tgaattagctgtatcgtcatt

SEQ ID NO: 1487 - RNA, 21 nt, synthetic construct
  modified_base 20..21: mod_base = OTHER; note = thymine
  modified_base 1: mod_base = OTHER; note = cytidine
  modified_base 2: mod_base = OTHER; note = uridine
  modified_base 3: mod_base = OTHER; note = guanosine
  modified_base 4: mod_base = OTHER; note = adenosine
  modified_base 5: mod_base = OTHER; note = adenosine
  modified_base 6: mod_base = OTHER; note = uridine
  modified_base 7: mod_base = um
  modified_base 8: mod_base = OTHER; note = adenosine
  modified_base 9: mod_base = OTHER; note = guanosine
  modified_base 10: mod_base = OTHER; note = cytidine
  modified_base 11: mod_base = OTHER; note = uridine
  modified_base 12: mod_base = OTHER; note = guanosine
  modified_base 13: mod_base = um
  modified_base 14: mod_base = OTHER; note = adenosine
  modified_base 15: mod_base = OTHER; note = uridine
  modified_base 16: mod_base = OTHER; note = cytidine
  modified_base 17: mod_base = OTHER; note = guanosine
  modified_base 18: mod_base = OTHER; note = uridine
  modified_base 19: mod_base = OTHER; note = cytidine
  modified_base 20: mod_base = OTHER; note = 2'-deoxythymidine
  modified_base 21: mod_base = OTHER; note = 2'-deoxythymidine
  source 1..21: mol_type = other RNA
ctgaattagctgtatcgtctt

SEQ ID NO: 1488 - RNA, 21 nt, synthetic construct
  modified_base 20..21: mod_base = OTHER; note = thymine
  modified_base 1: mod_base = OTHER; note = uridine
  modified_base 2: mod_base = OTHER; note = cytidine
  modified_base 3: mod_base = OTHER; note = uridine
  modified_base 4: mod_base = OTHER; note = guanosine
  modified_base 5: mod_base = OTHER; note = adenosine
  modified_base 6: mod_base = OTHER; note = adenosine
  modified_base 7: mod_base = OTHER; note = uridine
  modified_base 8: mod_base = um
  modified_base 9: mod_base = OTHER; note = adenosine
  modified_base 10: mod_base = OTHER; note = guanosine
  modified_base 11: mod_base = OTHER; note = cytidine
  modified_base 12: mod_base = OTHER; note = uridine
  modified_base 13: mod_base = OTHER; note = guanosine
  modified_base 14: mod_base = um
  modified_base 15: mod_base = OTHER; note = adenosine
  modified_base 16: mod_base = OTHER; note = uridine
  modified_base 17: mod_base = OTHER; note = cytidine
  modified_base 18: mod_base = OTHER; note = guanosine
  modified_base 19: mod_base = OTHER; note = uridine
  modified_base 20: mod_base = OTHER; note = 2'-deoxythymidine
  modified_base 21: mod_base = OTHER; note = 2'-deoxythymidine
  source 1..21: mol_type = other RNA
tctgaattagctgtatcgttt

SEQ ID NO: 1489 - RNA, 21 nt, synthetic construct
  modified_base 20..21: mod_base = OTHER; note = thymine
  modified_base 1: mod_base = OTHER; note = uridine
  modified_base 2: mod_base = OTHER; note = uridine
  modified_base 3: mod_base = OTHER; note = cytidine
  modified_base 4: mod_base = OTHER; note = uridine
  modified_base 5: mod_base = OTHER; note = guanosine
  modified_base 6: mod_base = OTHER; note = adenosine
  modified_base 7: mod_base = OTHER; note = adenosine
  modified_base 8: mod_base = OTHER; note = uridine
  modified_base 9: mod_base = um
  modified_base 10: mod_base = OTHER; note = adenosine
  modified_base 11: mod_base = OTHER; note = guanosine
  modified_base 12: mod_base = OTHER; note = cytidine
  modified_base 13: mod_base = OTHER; note = uridine
  modified_base 14: mod_base = OTHER; note = guanosine
  modified_base 15: mod_base = um
  modified_base 16: mod_base = OTHER; note = adenosine
  modified_base 17: mod_base = OTHER; note = uridine
  modified_base 18: mod_base = OTHER; note = cytidine
  modified_base 19: mod_base = OTHER; note = guanosine
  modified_base 20: mod_base = OTHER; note = 2'-deoxythymidine
  modified_base 21: mod_base = OTHER; note = 2'-deoxythymidine
  source 1..21: mol_type = other RNA
ttctgaattagctgtatcgtt

SEQ ID NO: 1490 - RNA, 21 nt, synthetic construct
  modified_base 20..21: mod_base = OTHER; note = thymine
  modified_base 1: mod_base = OTHER; note = adenosine
  modified_base 2: mod_base = OTHER; note = uridine
  modified_base 3: mod_base = OTHER; note = uridine
  modified_base 4: mod_base = OTHER; note = cytidine
  modified_base 5: mod_base = OTHER; note = uridine
  modified_base 6: mod_base = OTHER; note = guanosine
  modified_base 7: mod_base = OTHER; note = adenosine
  modified_base 8: mod_base = OTHER; note = adenosine
  modified_base 9: mod_base = OTHER; note = uridine
  modified_base 10: mod_base = um
  modified_base 11: mod_base = OTHER; note = adenosine
  modified_base 12: mod_base = OTHER; note = guanosine
  modified_base 13: mod_base = OTHER; note = cytidine
  modified_base 14: mod_base = OTHER; note = uridine
  modified_base 15: mod_base = OTHER; note = guanosine
  modified_base 16: mod_base = um
  modified_base 17: mod_base = OTHER; note = adenosine
  modified_base 18: mod_base = OTHER; note = uridine
  modified_base 19: mod_base = OTHER; note = cytidine
  modified_base 20: mod_base = OTHER; note = 2'-deoxythymidine
  modified_base 21: mod_base = OTHER; note = 2'-deoxythymidine
  source 1..21: mol_type = other RNA
attctgaattagctgtatctt

SEQ ID NO: 1491 - RNA, 21 nt, synthetic construct
  modified_base 20..21: mod_base = OTHER; note = thymine
  modified_base 1: mod_base = OTHER; note = guanosine
  modified_base 2: mod_base = OTHER; note = adenosine
  modified_base 3: mod_base = OTHER; note = uridine
  modified_base 4: mod_base = OTHER; note = uridine
  modified_base 5: mod_base = OTHER; note = cytidine
  modified_base 6: mod_base = OTHER; note = uridine
  modified_base 7: mod_base = OTHER; note = guanosine
  modified_base 8: mod_base = OTHER; note = adenosine
  modified_base 9: mod_base = OTHER; note = adenosine
  modified_base 10: mod_base = OTHER; note = uridine
  modified_base 11: mod_base = um
  modified_base 12: mod_base = OTHER; note = adenosine
  modified_base 13: mod_base = OTHER; note = guanosine
  modified_base 14: mod_base = OTHER; note = cytidine
  modified_base 15: mod_base = OTHER; note = uridine
  modified_base 16: mod_base = OTHER; note = guanosine
  modified_base 17: mod_base = um
  modified_base 18: mod_base = OTHER; note = adenosine
  modified_base 19: mod_base = OTHER; note = uridine
  modified_base 20: mod_base = OTHER; note = 2'-deoxythymidine
  modified_base 21: mod_base = OTHER; note = 2'-deoxythymidine
  source 1..21: mol_type = other RNA
gattctgaattagctgtattt

SEQ ID NO: 1492 - RNA, 21 nt, synthetic construct
  modified_base 20..21: mod_base = OTHER; note = thymine
  modified_base 1: mod_base = OTHER; note = uridine
  modified_base 2: mod_base = OTHER; note = guanosine
  modified_base 3: mod_base = OTHER; note = adenosine
  modified_base 4: mod_base = OTHER; note = uridine
  modified_base 5: mod_base = OTHER; note = uridine
  modified_base 6: mod_base = OTHER; note = cytidine
  modified_base 7: mod_base = OTHER; note = uridine
  modified_base 8: mod_base = OTHER; note = guanosine
  modified_base 9: mod_base = OTHER; note = adenosine
  modified_base 10: mod_base = OTHER; note = adenosine
  modified_base 11: mod_base = OTHER; note = uridine
  modified_base 12: mod_base = um
  modified_base 13: mod_base = OTHER; note = adenosine
  modified_base 14: mod_base = OTHER; note = guanosine
  modified_base 15: mod_base = OTHER; note = cytidine
  modified_base 16: mod_base = OTHER; note = uridine
  modified_base 17: mod_base = OTHER; note = guanosine
  modified_base 18: mod_base = um
  modified_base 19: mod_base = OTHER; note = adenosine
  modified_base 20: mod_base = OTHER; note = 2'-deoxythymidine
  modified_base 21: mod_base = OTHER; note = 2'-deoxythymidine
  source 1..21: mol_type = other RNA
tgattctgaattagctgtatt

SEQ ID NO: 1493 - RNA, 21 nt, synthetic construct
  modified_base 20..21: mod_base = OTHER; note = thymine
  modified_base 1: mod_base = OTHER; note = adenosine
  modified_base 2: mod_base = OTHER; note = uridine
  modified_base 3: mod_base = OTHER; note = guanosine
  modified_base 4: mod_base = OTHER; note = adenosine
  modified_base 5: mod_base = OTHER; note = uridine
  modified_base 6: mod_base = OTHER; note = uridine
  modified_base 7: mod_base = OTHER; note = cytidine
  modified_base 8: mod_base = OTHER; note = uridine
  modified_base 9: mod_base = OTHER; note = guanosine
  modified_base 10: mod_base = OTHER; note = adenosine
  modified_base 11: mod_base = OTHER; note = adenosine
  modified_base 12: mod_base = OTHER; note = uridine
  modified_base 13: mod_base = um
  modified_base 14: mod_base = OTHER; note = adenosine
  modified_base 15: mod_base = OTHER; note = guanosine
  modified_base 16: mod_base = OTHER; note = cytidine
  modified_base 17: mod_base = OTHER; note = uridine
  modified_base 18: mod_base = OTHER; note = guanosine
  modified_base 19: mod_base = OTHER; note = uridine
  modified_base 20: mod_base = OTHER; note = 2'-deoxythymidine
  modified_base 21: mod_base = OTHER; note = 2'-deoxythymidine
  source 1..21: mol_type = other RNA
atgattctgaattagctgttt

SEQ ID NO: 1494 - RNA, 21 nt, synthetic construct
  modified_base 20..21: mod_base = OTHER; note = thymine
  modified_base 1: mod_base = OTHER; note = adenosine
  modified_base 2: mod_base = OTHER; note = adenosine
  modified_base 3: mod_base = OTHER; note = uridine
  modified_base 4: mod_base = OTHER; note = guanosine
  modified_base 5: mod_base = OTHER; note = adenosine
  modified_base 6: mod_base = OTHER; note = uridine
  modified_base 7: mod_base = OTHER; note = uridine
  modified_base 8: mod_base = OTHER; note = cytidine
  modified_base 9: mod_base = OTHER; note = uridine
  modified_base 10: mod_base = OTHER; note = guanosine
  modified_base 11: mod_base = OTHER; note = adenosine
  modified_base 12: mod_base = OTHER; note = adenosine
  modified_base 13: mod_base = OTHER; note = uridine
  modified_base 14: mod_base = um
  modified_base 15: mod_base = OTHER; note = adenosine
  modified_base 16: mod_base = OTHER; note = guanosine
  modified_base 17: mod_base = OTHER; note = cytidine
  modified_base 18: mod_base = OTHER; note = uridine
  modified_base 19: mod_base = OTHER; note = guanosine
  modified_base 20: mod_base = OTHER; note = 2'-deoxythymidine
  modified_base 21: mod_base = OTHER; note = 2'-deoxythymidine
  source 1..21: mol_type = other RNA
aatgattctgaattagctgtt

SEQ ID NO: 1495 - RNA, 21 nt, synthetic construct
  modified_base 20..21: mod_base = OTHER; note = thymine
  modified_base 1: mod_base = OTHER; note = adenosine
  modified_base 2: mod_base = OTHER; note = adenosine
  modified_base 3: mod_base = OTHER; note = adenosine
  modified_base 4: mod_base = OTHER; note = uridine
  modified_base 5: mod_base = OTHER; note = guanosine
  modified_base 6: mod_base = OTHER; note = adenosine
  modified_base 7: mod_base = OTHER; note = uridine
  modified_base 8: mod_base = OTHER; note = uridine
  modified_base 9: mod_base = OTHER; note = cytidine
  modified_base 10: mod_base = OTHER; note = uridine
  modified_base 11: mod_base = OTHER; note = guanosine
  modified_base 12: mod_base = OTHER; note = adenosine
  modified_base 13: mod_base = OTHER; note = adenosine
  modified_base 14: mod_base = OTHER; note = uridine
  modified_base 15: mod_base = um
  modified_base 16: mod_base = OTHER; note = adenosine
  modified_base 17: mod_base = OTHER; note = guanosine
  modified_base 18: mod_base = OTHER; note = cytidine
  modified_base 19: mod_base = OTHER; note = uridine
  modified_base 20: mod_base = OTHER; note = 2'-deoxythymidine
  modified_base 21: mod_base = OTHER; note = 2'-deoxythymidine
  source 1..21: mol_type = other RNA
aaatgattctgaattagcttt

SEQ ID NO: 1496 - RNA, 21 nt, synthetic construct
  modified_base 20..21: mod_base = OTHER; note = thymine
  modified_base 1: mod_base = OTHER; note = adenosine
  modified_base 2: mod_base = OTHER; note = adenosine
  modified_base 3: mod_base = OTHER; note = adenosine
  modified_base 4: mod_base = OTHER; note = adenosine
  modified_base 5: mod_base = OTHER; note = uridine
  modified_base 6: mod_base = OTHER; note = guanosine
  modified_base 7: mod_base = OTHER; note = adenosine
  modified_base 8: mod_base = OTHER; note = uridine
  modified_base 9: mod_base = OTHER; note = uridine
  modified_base 10: mod_base = OTHER; note = cytidine
  modified_base 11: mod_base = OTHER; note = uridine
  modified_base 12: mod_base = OTHER; note = guanosine
  modified_base 13: mod_base = OTHER; note = adenosine
  modified_base 14: mod_base = OTHER; note = adenosine
  modified_base 15: mod_base = OTHER; note = uridine
  modified_base 16: mod_base = um
  modified_base 17: mod_base = OTHER; note = adenosine
  modified_base 18: mod_base = OTHER; note = guanosine
  modified_base 19: mod_base = OTHER; note = cytidine
  modified_base 20: mod_base = OTHER; note = 2'-deoxythymidine
  modified_base 21: mod_base = OTHER; note = 2'-deoxythymidine
  source 1..21: mol_type = other RNA
aaaatgattctgaattagctt

SEQ ID NO: 1497 - RNA, 21 nt, synthetic construct
  modified_base 20..21: mod_base = OTHER; note = thymine
  modified_base 1: mod_base = cm
  modified_base 2: mod_base = OTHER; note = adenosine
  modified_base 3: mod_base = OTHER; note = adenosine
  modified_base 4: mod_base = OTHER; note = adenosine
  modified_base 5: mod_base = OTHER; note = adenosine
  modified_base 6: mod_base = OTHER; note = uridine
  modified_base 7: mod_base = OTHER; note = guanosine
  modified_base 8: mod_base = OTHER; note = adenosine
  modified_base 9: mod_base = OTHER; note = uridine
  modified_base 10: mod_base = OTHER; note = uridine
  modified_base 11: mod_base = OTHER; note = cytidine
  modified_base 12: mod_base = OTHER; note = uridine
  modified_base 13: mod_base = OTHER; note = guanosine
  modified_base 14: mod_base = OTHER; note = adenosine
  modified_base 15: mod_base = OTHER; note = adenosine
  modified_base 16: mod_base = OTHER; note = uridine
  modified_base 17: mod_base = um
  modified_base 18: mod_base = OTHER; note = adenosine
  modified_base 19: mod_base = OTHER; note = guanosine
  modified_base 20: mod_base = OTHER; note = 2'-deoxythymidine
  modified_base 21: mod_base = OTHER; note = 2'-deoxythymidine
  source 1..21: mol_type = other RNA
caaaatgattctgaattagtt

SEQ ID NO: 1498 - RNA, 21 nt, synthetic construct
  modified_base 20..21: mod_base = OTHER; note = thymine
  modified_base 1: mod_base = OTHER; note = adenosine
  modified_base 2: mod_base = cm
  modified_base 3: mod_base = OTHER; note = adenosine
  modified_base 4: mod_base = OTHER; note = adenosine
  modified_base 5: mod_base = OTHER; note = adenosine
  modified_base 6: mod_base = OTHER; note = adenosine
  modified_base 7: mod_base = OTHER; note = uridine
  modified_base 8: mod_base = OTHER; note = guanosine
  modified_base 9: mod_base = OTHER; note = adenosine
  modified_base 10: mod_base = OTHER; note = uridine
  modified_base 11: mod_base = OTHER; note = uridine
  modified_base 12: mod_base = OTHER; note = cytidine
  modified_base 13: mod_base = OTHER; note = uridine
  modified_base 14: mod_base = OTHER; note = guanosine
  modified_base 15: mod_base = OTHER; note = adenosine
  modified_base 16: mod_base = OTHER; note = adenosine
  modified_base 17: mod_base = OTHER; note = uridine
  modified_base 18: mod_base = um
  modified_base 19: mod_base = OTHER; note = adenosine
  modified_base 20: mod_base = OTHER; note = 2'-deoxythymidine
  modified_base 21: mod_base = OTHER; note = 2'-deoxythymidine
  source 1..21: mol_type = other RNA
acaaaatgattctgaattatt

SEQ ID NO: 1499 - DNA, 21 bp, synthetic construct
  modified_base 1: mod_base = cm
  modified_base 2: mod_base = OTHER; note = adenosine
  modified_base 3: mod_base = cm
  modified_base 4: mod_base = OTHER; note = adenosine
  modified_base 5: mod_base = OTHER; note = adenosine
  modified_base 6: mod_base = OTHER; note = adenosine
  modified_base 7: mod_base = OTHER; note = adenosine
  modified_base 8: mod_base = OTHER; note = uridine
  modified_base 9: mod_base = OTHER; note = guanosine
  modified_base 10: mod_base = OTHER; note = adenosine
  modified_base 11: mod_base = OTHER; note = uridine
  modified_base 12: mod_base = OTHER; note = uridine
  modified_base 13: mod_base = OTHER; note = cytidine
  modified_base 14: mod_base = OTHER; note = uridine
  modified_base 15: mod_base = OTHER; note = guanosine
  modified_base 16: mod_base = OTHER; note = adenosine
  modified_base 17: mod_base = OTHER; note = adenosine
  modified_base 18: mod_base = OTHER; note = uridine
  modified_base 19: mod_base = OTHER; note = uridine
  modified_base 20: mod_base = OTHER; note = 2'-deoxythymidine
  modified_base 21: mod_base = OTHER; note = 2'-deoxythymidine
  source 1..21: mol_type = other DNA
cacaaaatgattctgaatttt

SEQ ID NO: 1500 - DNA, 21 bp, synthetic construct
  modified_base 1: mod_base = OTHER; note = cytidine
  modified_base 2: mod_base = cm
  modified_base 3: mod_base = OTHER; note = adenosine
  modified_base 4: mod_base = cm
  modified_base 5: mod_base = OTHER; note = adenosine
  modified_base 6: mod_base = OTHER; note = adenosine
  modified_base 7: mod_base = OTHER; note = adenosine
  modified_base 8: mod_base = OTHER; note = adenosine
  modified_base 9: mod_base = OTHER; note = uridine
  modified_base 10: mod_base = OTHER; note = guanosine
  modified_base 11: mod_base = OTHER; note = adenosine
  modified_base 12: mod_base = OTHER; note = uridine
  modified_base 13: mod_base = OTHER; note = uridine
  modified_base 14: mod_base = OTHER; note = cytidine
  modified_base 15: mod_base = OTHER; note = uridine
  modified_base 16: mod_base = OTHER; note = guanosine
  modified_base 17: mod_base = OTHER; note = adenosine
  modified_base 18: mod_base = OTHER; note = adenosine
  modified_base 19: mod_base = OTHER; note = uridine
  modified_base 20: mod_base = OTHER; note = 2'-deoxythymidine
  modified_base 21: mod_base = OTHER; note = 2'-deoxythymidine
  source 1..21: mol_type = other DNA
ccacaaaatgattctgaattt

SEQ ID NO: 1501 - DNA, 21 bp, synthetic construct
  modified_base 1: mod_base = OTHER; note = uridine
  modified_base 2: mod_base = OTHER; note = cytidine
  modified_base 3: mod_base = cm
  modified_base 4: mod_base = OTHER; note = adenosine
  modified_base 5: mod_base = cm
  modified_base 6: mod_base = OTHER; note = adenosine
  modified_base 7: mod_base = OTHER; note = adenosine
  modified_base 8: mod_base = OTHER; note = adenosine
  modified_base 9: mod_base = OTHER; note = adenosine
  modified_base 10: mod_base = OTHER; note = uridine
  modified_base 11: mod_base = OTHER; note = guanosine
  modified_base 12: mod_base = OTHER; note = adenosine
  modified_base 13: mod_base = OTHER; note = uridine
  modified_base 14: mod_base = OTHER; note = uridine
  modified_base 15: mod_base = OTHER; note = cytidine
  modified_base 16: mod_base = OTHER; note = uridine
  modified_base 17: mod_base = OTHER; note = guanosine
  modified_base 18: mod_base = OTHER; note = adenosine
  modified_base 19: mod_base = OTHER; note = adenosine
  modified_base 20: mod_base = OTHER; note = 2'-deoxythymidine
  modified_base 21: mod_base = OTHER; note = 2'-deoxythymidine
  source 1..21: mol_type = other DNA
tccacaaaatgattctgaatt

SEQ ID NO: 1502 - DNA, 21 bp, synthetic construct
  modified_base 1: mod_base = OTHER; note = guanosine
  modified_base 2: mod_base = OTHER; note = uridine
  modified_base 3: mod_base = OTHER; note = cytidine
  modified_base 4: mod_base = cm
  modified_base 5: mod_base = OTHER; note = adenosine
  modified_base 6: mod_base = cm
  modified_base 7: mod_base = OTHER; note = adenosine
  modified_base 8: mod_base = OTHER; note = adenosine
  modified_base 9: mod_base = OTHER; note = adenosine
  modified_base 10: mod_base = OTHER; note = adenosine
  modified_base 11: mod_base = OTHER; note = uridine
  modified_base 12: mod_base = OTHER; note = guanosine
  modified_base 13: mod_base = OTHER; note = adenosine
  modified_base 14: mod_base = OTHER; note = uridine
  modified_base 15: mod_base = OTHER; note = uridine
  modified_base 16: mod_base = OTHER; note = cytidine
  modified_base 17: mod_base = OTHER; note = uridine
  modified_base 18: mod_base = OTHER; note = guanosine
  modified_base 19: mod_base = OTHER; note = adenosine
  modified_base 20: mod_base = OTHER; note = 2'-deoxythymidine
  modified_base 21: mod_base = OTHER; note = 2'-deoxythymidine
  source 1..21: mol_type = other DNA
gtccacaaaatgattctgatt

SEQ ID NO: 1503 - DNA, 21 bp, synthetic construct
  modified_base 1: mod_base = OTHER; note = cytidine
  modified_base 2: mod_base = OTHER; note = guanosine
  modified_base 3: mod_base = OTHER; note = uridine
  modified_base 4: mod_base = OTHER; note = cytidine
  modified_base 5: mod_base = cm
  modified_base 6: mod_base = OTHER; note = adenosine
  modified_base 7: mod_base = cm
  modified_base 8: mod_base = OTHER; note = adenosine
  modified_base 9: mod_base = OTHER; note = adenosine
  modified_base 10: mod_base = OTHER; note = adenosine
  modified_base 11: mod_base = OTHER; note = adenosine
  modified_base 12: mod_base = OTHER; note = uridine
  modified_base 13: mod_base = OTHER; note = guanosine
  modified_base 14: mod_base = OTHER; note = adenosine
  modified_base 15: mod_base = OTHER; note = uridine
  modified_base 16: mod_base = OTHER; note = uridine
  modified_base 17: mod_base = OTHER; note = cytidine
  modified_base 18: mod_base = OTHER; note = uridine
  modified_base 19: mod_base = OTHER; note = guanosine
  modified_base 20: mod_base = OTHER; note = 2'-deoxythymidine
  modified_base 21: mod_base = OTHER; note = 2'-deoxythymidine
  source 1..21: mol_type = other DNA
cgtccacaaaatgattctgtt

SEQ ID NO: 1504 - DNA, 21 bp, synthetic construct
  modified_base 1: mod_base = OTHER; note = uridine
  modified_base 2: mod_base = OTHER; note = cytidine
  modified_base 3: mod_base = OTHER; note = guanosine
  modified_base 4: mod_base = OTHER; note = uridine
  modified_base 5: mod_base = OTHER; note = cytidine
  modified_base 6: mod_base = cm
  modified_base 7: mod_base = OTHER; note = adenosine
  modified_base 8: mod_base = cm
  modified_base 9: mod_base = OTHER; note = adenosine
  modified_base 10: mod_base = OTHER; note = adenosine
  modified_base 11: mod_base = OTHER; note = adenosine
  modified_base 12: mod_base = OTHER; note = adenosine
  modified_base 13: mod_base = OTHER; note = uridine
  modified_base 14: mod_base = OTHER; note = guanosine
  modified_base 15: mod_base = OTHER; note = adenosine
  modified_base 16: mod_base = OTHER; note = uridine
  modified_base 17: mod_base = OTHER; note = uridine
  modified_base 18: mod_base = OTHER; note = cytidine
  modified_base 19: mod_base = OTHER; note = uridine
  modified_base 20: mod_base = OTHER; note = 2'-deoxythymidine
  modified_base 21: mod_base = OTHER; note = 2'-deoxythymidine
  source 1..21: mol_type = other DNA
tcgtccacaaaatgattcttt

SEQ ID NO: 1505 - DNA, 21 bp, synthetic construct
  modified_base 1: mod_base = OTHER; note = uridine
  modified_base 2: mod_base = OTHER; note = uridine
  modified_base 3: mod_base = OTHER; note = cytidine
  modified_base 4: mod_base = OTHER; note = guanosine
  modified_base 5: mod_base = OTHER; note = uridine
  modified_base 6: mod_base = OTHER; note = cytidine
  modified_base 7: mod_base = cm
  modified_base 8: mod_base = OTHER; note = adenosine
  modified_base 9: mod_base = cm
  modified_base 10: mod_base = OTHER; note = adenosine
  modified_base 11: mod_base = OTHER; note = adenosine
  modified_base 12: mod_base = OTHER; note = adenosine
  modified_base 13: mod_base = OTHER; note = adenosine
  modified_base 14: mod_base = OTHER; note = uridine
  modified_base 15: mod_base = OTHER; note = guanosine
  modified_base 16: mod_base = OTHER; note = adenosine
  modified_base 17: mod_base = OTHER; note = uridine
  modified_base 18: mod_base = OTHER; note = uridine
  modified_base 19: mod_base = OTHER; note = cytidine
  modified_base 20: mod_base = OTHER; note = 2'-deoxythymidine
  modified_base 21: mod_base = OTHER; note = 2'-deoxythymidine
  source 1..21: mol_type = other DNA
ttcgtccacaaaatgattctt

SEQ ID NO: 1506 - DNA, 21 bp, synthetic construct
  modified_base 1: mod_base = OTHER; note = adenosine
  modified_base 2: mod_base = OTHER; note = uridine
  modified_base 3: mod_base = OTHER; note = uridine
  modified_base 4: mod_base = OTHER; note = cytidine
  modified_base 5: mod_base = OTHER; note = guanosine
  modified_base 6: mod_base = OTHER; note = uridine
  modified_base 7: mod_base = OTHER; note = cytidine
  modified_base 8: mod_base = cm
  modified_base 9: mod_base = OTHER; note = adenosine
  modified_base 10: mod_base = cm
  modified_base 11: mod_base = OTHER; note = adenosine
  modified_base 12: mod_base = OTHER; note = adenosine
  modified_base 13: mod_base = OTHER; note = adenosine
  modified_base 14: mod_base = OTHER; note = adenosine
  modified_base 15: mod_base = OTHER; note = uridine
  modified_base 16: mod_base = OTHER; note = guanosine
  modified_base 17: mod_base = OTHER; note = adenosine
  modified_base 18: mod_base = OTHER; note = uridine
  modified_base 19: mod_base = OTHER; note = uridine
  modified_base 20: mod_base = OTHER; note = 2'-deoxythymidine
  modified_base 21: mod_base = OTHER; note = 2'-deoxythymidine
  source 1..21: mol_type = other DNA
attcgtccacaaaatgatttt

SEQ ID NO: 1507 - RNA, 21 nt, synthetic construct
  modified_base 20..21: mod_base = OTHER; note = thymine
  modified_base 1: mod_base = um
  modified_base 2: mod_base = OTHER; note = adenosine
  modified_base 3: mod_base = OTHER; note = uridine
  modified_base 4: mod_base = OTHER; note = uridine
  modified_base 5: mod_base = OTHER; note = cytidine
  modified_base 6: mod_base = OTHER; note = guanosine
  modified_base 7: mod_base = OTHER; note = uridine
  modified_base 8: mod_base = OTHER; note = cytidine
  modified_base 9: mod_base = cm
  modified_base 10: mod_base = OTHER; note = adenosine
  modified_base 11: mod_base = cm
  modified_base 12: mod_base = OTHER; note = adenosine
  modified_base 13: mod_base = OTHER; note = adenosine
  modified_base 14: mod_base = OTHER; note = adenosine
  modified_base 15: mod_base = OTHER; note = adenosine
  modified_base 16: mod_base = OTHER; note = uridine
  modified_base 17: mod_base = OTHER; note = guanosine
  modified_base 18: mod_base = OTHER; note = adenosine
  modified_base 19: mod_base = OTHER; note = uridine
  modified_base 20: mod_base = OTHER; note = 2'-deoxythymidine
  modified_base 21: mod_base = OTHER; note = 2'-deoxythymidine
  source 1..21: mol_type = other RNA
tattcgtccacaaaatgattt

SEQ ID NO: 1508 - RNA, 21 nt, synthetic construct
  modified_base 20..21: mod_base = OTHER; note = thymine
  modified_base 1: mod_base = OTHER; note = adenosine
  modified_base 2: mod_base = um
  modified_base 3: mod_base = OTHER; note = adenosine
  modified_base 4: mod_base = OTHER; note = uridine
  modified_base 5: mod_base = OTHER; note = uridine
  modified_base 6: mod_base = OTHER; note = cytidine
  modified_base 7: mod_base = OTHER; note = guanosine
  modified_base 8: mod_base = OTHER; note = uridine
  modified_base 9: mod_base = OTHER; note = cytidine
  modified_base 10: mod_base = cm
  modified_base 11: mod_base = OTHER; note = adenosine
  modified_base 12: mod_base = cm
  modified_base 13: mod_base = OTHER; note = adenosine
  modified_base 14: mod_base = OTHER; note = adenosine
  modified_base 15: mod_base = OTHER; note = adenosine
  modified_base 16: mod_base = OTHER; note = adenosine
  modified_base 17: mod_base = OTHER; note = uridine
  modified_base 18: mod_base = OTHER; note = guanosine
  modified_base 19: mod_base = OTHER; note = adenosine
  modified_base 20: mod_base = OTHER; note = 2'-deoxythymidine
  modified_base 21: mod_base = OTHER; note = 2'-deoxythymidine
  source 1..21: mol_type = other RNA
atattcgtccacaaaatgatt

SEQ ID NO: 1509 - RNA, 21 nt, synthetic construct
  modified_base 20..21: mod_base = OTHER; note = thymine
  modified_base 1: mod_base = cm
  modified_base 2: mod_base = OTHER; note = adenosine
  modified_base 3: mod_base = um
  modified_base 4: mod_base = OTHER; note = adenosine
  modified_base 5: mod_base = OTHER; note = uridine
  modified_base 6: mod_base = OTHER; note = uridine
  modified_base 7: mod_base = OTHER; note = cytidine
  modified_base 8: mod_base = OTHER; note = guanosine
  modified_base 9: mod_base = OTHER; note = uridine
  modified_base 10: mod_base = OTHER; note = cytidine
  modified_base 11: mod_base = cm
  modified_base 12: mod_base = OTHER; note = adenosine
  modified_base 13: mod_base = cm
  modified_base 14: mod_base = OTHER; note = adenosine
  modified_base 15: mod_base = OTHER; note = adenosine
  modified_base 16: mod_base = OTHER; note = adenosine
  modified_base 17: mod_base = OTHER; note = adenosine
  modified_base 18: mod_base = OTHER; note = uridine
  modified_base 19: mod_base = OTHER; note = guanosine
  modified_base 20: mod_base = OTHER; note = 2'-deoxythymidine
  modified_base 21: mod_base = OTHER; note = 2'-deoxythymidine
  source 1..21: mol_type = other RNA
catattcgtccacaaaatgtt

SEQ ID NO: 1510 - RNA, 21 nt, synthetic construct
  modified_base 20..21: mod_base = OTHER; note = thymine
  modified_base 1: mod_base = OTHER; note = uridine
  modified_base 2: mod_base = cm
  modified_base 3: mod_base = OTHER; note = adenosine
  modified_base 4: mod_base = um
  modified_base 5: mod_base = OTHER; note = adenosine
  modified_base 6: mod_base = OTHER; note = uridine
  modified_base 7: mod_base = OTHER; note = uridine
  modified_base 8: mod_base = OTHER; note = cytidine
  modified_base 9: mod_base = OTHER; note = guanosine
  modified_base 10: mod_base = OTHER; note = uridine
  modified_base 11: mod_base = OTHER; note = cytidine
  modified_base 12: mod_base = cm
  modified_base 13: mod_base = OTHER; note = adenosine
  modified_base 14: mod_base = cm
  modified_base 15: mod_base = OTHER; note = adenosine
  modified_base 16: mod_base = OTHER; note = adenosine
  modified_base 17: mod_base = OTHER; note = adenosine
  modified_base 18: mod_base = OTHER; note = adenosine
  modified_base 19: mod_base = OTHER; note = uridine
  modified_base 20: mod_base = OTHER; note = 2'-deoxythymidine
  modified_base 21: mod_base = OTHER; note = 2'-deoxythymidine
  source 1..21: mol_type = other RNA
tcatattcgtccacaaaattt

SEQ ID NO: 1511 - RNA, 21 nt, synthetic construct
  modified_base 20..21: mod_base = OTHER; note = thymine
  modified_base 1: mod_base = OTHER; note = adenosine
  modified_base 2: mod_base = OTHER; note = uridine
  modified_base 3: mod_base = cm
  modified_base 4: mod_base = OTHER; note = adenosine
  modified_base 5: mod_base = um
  modified_base 6: mod_base = OTHER; note = adenosine
  modified_base 7: mod_base = OTHER; note = uridine
  modified_base 8: mod_base = OTHER; note = uridine
  modified_base 9: mod_base = OTHER; note = cytidine
  modified_base 10: mod_base = OTHER; note = guanosine
  modified_base 11: mod_base = OTHER; note = uridine
  modified_base 12: mod_base = OTHER; note = cytidine
  modified_base 13: mod_base = cm
  modified_base 14: mod_base = OTHER; note = adenosine
  modified_base 15: mod_base = cm
  modified_base 16: mod_base = OTHER; note = adenosine
  modified_base 17: mod_base = OTHER; note = adenosine
  modified_base 18: mod_base = OTHER; note = adenosine
  modified_base 19: mod_base = OTHER; note = adenosine
  modified_base 20: mod_base = OTHER; note = 2'-deoxythymidine
  modified_base 21: mod_base = OTHER; note = 2'-deoxythymidine
  source 1..21: mol_type = other RNA
atcatattcgtccacaaaatt

SEQ ID NO: 1512 - RNA, 21 nt, synthetic construct
  modified_base 20..21: mod_base = OTHER; note = thymine
  modified_base 1: mod_base = OTHER; note = guanosine
  modified_base 2: mod_base = OTHER; note = adenosine
  modified_base 3: mod_base = OTHER; note = uridine
  modified_base 4: mod_base = cm
  modified_base 5: mod_base = OTHER; note = adenosine
  modified_base 6: mod_base = um
  modified_base 7: mod_base = OTHER; note = adenosine
  modified_base 8: mod_base = OTHER; note = uridine
  modified_base 9: mod_base = OTHER; note = uridine
  modified_base 10: mod_base = OTHER; note = cytidine
  modified_base 11: mod_base = OTHER; note = guanosine
  modified_base 12: mod_base = OTHER; note = uridine
  modified_base 13: mod_base = OTHER; note = cytidine
  modified_base 14: mod_base = cm
  modified_base 15: mod_base = OTHER; note = adenosine
  modified_base 16: mod_base = cm
  modified_base 17: mod_base = OTHER; note = adenosine
  modified_base 18: mod_base = OTHER; note = adenosine
  modified_base 19: mod_base = OTHER; note = adenosine
  modified_base 20: mod_base = OTHER; note = 2'-deoxythymidine
  modified_base 21: mod_base = OTHER; note = 2'-deoxythymidine
  source 1..21: mol_type = other RNA
gatcatattcgtccacaaatt

SEQ ID NO: 1513 - RNA, 21 nt, synthetic construct
  modified_base 20..21: mod_base = OTHER; note = thymine
  modified_base 1: mod_base = OTHER; note = guanosine
  modified_base 2: mod_base = OTHER; note = guanosine
  modified_base 3: mod_base = OTHER; note = adenosine
  modified_base 4: mod_base = OTHER; note = uridine
  modified_base 5: mod_base = cm
  modified_base 6: mod_base = OTHER; note = adenosine
  modified_base 7: mod_base = um
  modified_base 8: mod_base = OTHER; note = adenosine
  modified_base 9: mod_base = OTHER; note = uridine
  modified_base 10: mod_base = OTHER; note = uridine
  modified_base 11: mod_base = OTHER; note = cytidine
  modified_base 12: mod_base = OTHER; note = guanosine
  modified_base 13: mod_base = OTHER; note = uridine
  modified_base 14: mod_base = OTHER; note = cytidine
  modified_base 15: mod_base = cm
  modified_base 16: mod_base = OTHER; note = adenosine
  modified_base 17: mod_base = cm
  modified_base 18: mod_base = OTHER; note = adenosine
  modified_base 19: mod_base = OTHER; note = adenosine
  modified_base 20: mod_base = OTHER; note = 2'-deoxythymidine
  modified_base 21: mod_base = OTHER; note = 2'-deoxythymidine
  source 1..21: mol_type = other RNA
ggatcatattcgtccacaatt

SEQ ID NO: 1514 - RNA, 21 nt, synthetic construct
  modified_base 20..21: mod_base = OTHER; note = thymine
  modified_base 1: mod_base = OTHER; note = uridine
  modified_base 2: mod_base = OTHER; note = guanosine
  modified_base 3: mod_base = OTHER; note = guanosine
  modified_base 4: mod_base = OTHER; note = adenosine
  modified_base 5: mod_base = OTHER; note = uridine
  modified_base 6: mod_base = cm
  modified_base 7: mod_base = OTHER; note = adenosine
  modified_base 8: mod_base = um
  modified_base 9: mod_base = OTHER; note = adenosine
  modified_base 10: mod_base = OTHER; note = uridine
  modified_base 11: mod_base = OTHER; note = uridine
  modified_base 12: mod_base = OTHER; note = cytidine
  modified_base 13: mod_base = OTHER; note = guanosine
  modified_base 14: mod_base = OTHER; note = uridine
  modified_base 15: mod_base = OTHER; note = cytidine
  modified_base 16: mod_base = cm
  modified_base 17: mod_base = OTHER; note = adenosine
  modified_base 18: mod_base = cm
  modified_base 19: mod_base = OTHER; note = adenosine
  modified_base 20: mod_base = OTHER; note = 2'-deoxythymidine
  modified_base 21: mod_base = OTHER; note = 2'-deoxythymidine
  source 1..21: mol_type = other RNA
tggatcatattcgtccacatt

SEQ ID NO: 1515 - RNA, 21 nt, synthetic construct
  modified_base 20..21: mod_base = OTHER; note = thymine
  modified_base 1: mod_base = OTHER; note = uridine
  modified_base 2: mod_base = OTHER; note = uridine
  modified_base 3: mod_base = OTHER; note = guanosine
  modified_base 4: mod_base = OTHER; note = guanosine
  modified_base 5: mod_base = OTHER; note = adenosine
  modified_base 6: mod_base = OTHER; note = uridine
  modified_base 7: mod_base = cm
  modified_base 8: mod_base = OTHER; note = adenosine
  modified_base 9: mod_base = um
  modified_base 10: mod_base = OTHER; note = adenosine
  modified_base 11: mod_base = OTHER; note = uridine
  modified_base 12: mod_base = OTHER; note = uridine
  modified_base 13: mod_base = OTHER; note = cytidine
  modified_base 14: mod_base = OTHER; note = guanosine
  modified_base 15: mod_base = OTHER; note = uridine
  modified_base 16: mod_base = OTHER; note = cytidine
  modified_base 17: mod_base = cm
  modified_base 18: mod_base = OTHER; note = adenosine
  modified_base 19: mod_base = OTHER; note = cytidine
  modified_base 20: mod_base = OTHER; note = 2'-deoxythymidine
  modified_base 21: mod_base = OTHER; note = 2'-deoxythymidine
  source 1..21: mol_type = other RNA
ttggatcatattcgtccactt

SEQ ID NO: 1516 - RNA, 21 nt, synthetic construct
  modified_base 20..21: mod_base = OTHER; note = thymine
  modified_base 1: mod_base = OTHER; note = guanosine
  modified_base 2: mod_base = OTHER; note = uridine
  modified_base 3: mod_base = OTHER; note = uridine
  modified_base 4: mod_base = OTHER; note = guanosine
  modified_base 5: mod_base = OTHER; note = guanosine
  modified_base 6: mod_base = OTHER; note = adenosine
  modified_base 7: mod_base = OTHER; note = uridine
  modified_base 8: mod_base = cm
  modified_base 9: mod_base = OTHER; note = adenosine
  modified_base 10: mod_base = um
  modified_base 11: mod_base = OTHER; note = adenosine
  modified_base 12: mod_base = OTHER; note = uridine
  modified_base 13: mod_base = OTHER; note = uridine
  modified_base 14: mod_base = OTHER; note = cytidine
  modified_base 15: mod_base = OTHER; note = guanosine
  modified_base 16: mod_base = OTHER; note = uridine
  modified_base 17: mod_base = OTHER; note = cytidine
  modified_base 18: mod_base = cm
  modified_base 19: mod_base = OTHER; note = adenosine
  modified_base 20: mod_base = OTHER; note = 2'-deoxythymidine
  modified_base 21: mod_base = OTHER; note = 2'-deoxythymidine
  source 1..21: mol_type = other RNA
gttggatcatattcgtccatt

SEQ ID NO: 1517 - RNA, 21 nt, synthetic construct
  modified_base 20..21: mod_base = OTHER; note = thymine
  modified_base 1: mod_base = cm
  modified_base 2: mod_base = OTHER; note = adenosine
  modified_base 3: mod_base = OTHER; note = adenosine
  modified_base 4: mod_base = OTHER; note = uridine
  modified_base 5: mod_base = um
  modified_base 6: mod_base = OTHER; note = adenosine
  modified_base 7: mod_base = OTHER; note = cytidine
  modified_base 8: mod_base = um
  modified_base 9: mod_base = OTHER; note = adenosine
  modified_base 10: mod_base = OTHER; note = cytidine
  modified_base 11: mod_base = OTHER; note = uridine
  modified_base 12: mod_base = OTHER; note = uridine
  modified_base 13: mod_base = OTHER; note = guanosine
  modified_base 14: mod_base = OTHER; note = cytidine
  modified_base 15: mod_base = OTHER; note = uridine
  modified_base 16: mod_base = OTHER; note = uridine
  modified_base 17: mod_base = OTHER; note = cytidine
  modified_base 18: mod_base = OTHER; note = cytidine
  modified_base 19: mod_base = OTHER; note = uridine
  modified_base 20: mod_base = OTHER; note = 2'-deoxythymidine
  modified_base 21: mod_base = OTHER; note = 2'-deoxythymidine
  source 1..21: mol_type = other RNA
caattactacttgcttccttt

SEQ ID NO: 1518 - RNA, 21 nt, synthetic construct
  modified_base 20..21: mod_base = OTHER; note = thymine
  modified_base 1: mod_base = OTHER; note = uridine
  modified_base 2: mod_base = cm
  modified_base 3: mod_base = OTHER; note = adenosine
  modified_base 4: mod_base = OTHER; note = adenosine
  modified_base 5: mod_base = OTHER; note = uridine
  modified_base 6: mod_base = um
  modified_base 7: mod_base = OTHER; note = adenosine
  modified_base 8: mod_base = OTHER; note = cytidine
  modified_base 9: mod_base = um
  modified_base 10: mod_base = OTHER; note = adenosine
  modified_base 11: mod_base = OTHER; note = cytidine
  modified_base 12: mod_base = OTHER; note = uridine
  modified_base 13: mod_base = OTHER; note = uridine
  modified_base 14: mod_base = OTHER; note = guanosine
  modified_base 15: mod_base = OTHER; note = cytidine
  modified_base 16: mod_base = OTHER; note = uridine
  modified_base 17: mod_base = OTHER; note = uridine
  modified_base 18: mod_base = OTHER; note = cytidine
  modified_base 19: mod_base = OTHER; note = cytidine
  modified_base 20: mod_base = OTHER; note = 2'-deoxythymidine
  modified_base 21: mod_base = OTHER; note = 2'-deoxythymidine
  source 1..21: mol_type = other RNA
tcaattactacttgcttcctt

SEQ ID NO: 1519 - RNA, 21 nt, synthetic construct
  modified_base 20..21: mod_base = OTHER; note = thymine
  modified_base 1: mod_base = OTHER; note = adenosine
  modified_base 2: mod_base = OTHER; note = uridine
  modified_base 3: mod_base = cm
  modified_base 4: mod_base = OTHER; note = adenosine
  modified_base 5: mod_base = OTHER; note = adenosine
  modified_base 6: mod_base = OTHER; note = uridine
  modified_base 7: mod_base = um
  modified_base 8: mod_base = OTHER; note = adenosine
  modified_base 9: mod_base = OTHER; note = cytidine
  modified_base 10: mod_base = um
  modified_base 11: mod_base = OTHER; note = adenosine
  modified_base 12: mod_base = OTHER; note = cytidine
  modified_base 13: mod_base = OTHER; note = uridine
  modified_base 14: mod_base = OTHER; note = uridine
  modified_base 15: mod_base = OTHER; note = guanosine
  modified_base 16: mod_base = OTHER; note = cytidine
  modified_base 17: mod_base = OTHER; note = uridine
  modified_base 18: mod_base = OTHER; note = uridine
  modified_base 19: mod_base = OTHER; note = cytidine
  modified_base 20: mod_base = OTHER; note = 2'-deoxythymidine
  modified_base 21: mod_base = OTHER; note = 2'-deoxythymidine
  source 1..21: mol_type = other RNA
atcaattactacttgcttctt

SEQ ID NO: 1520 - RNA, 21 nt, synthetic construct
  modified_base 20..21: mod_base = OTHER; note = thymine
  modified_base 1: mod_base = cm
  modified_base 2: mod_base = OTHER; note = adenosine
  modified_base 3: mod_base = OTHER; note = uridine
  modified_base 4: mod_base = cm
  modified_base 5: mod_base = OTHER; note = adenosine
  modified_base 6: mod_base = OTHER; note = adenosine
  modified_base 7: mod_base = OTHER; note = uridine
  modified_base 8: mod_base = um
  modified_base 9: mod_base = OTHER; note = adenosine
  modified_base 10: mod_base = OTHER; note = cytidine
  modified_base 11: mod_base = um
  modified_base 12: mod_base = OTHER; note = adenosine
  modified_base 13: mod_base = OTHER; note = cytidine
  modified_base 14: mod_base = OTHER; note = uridine
  modified_base 15: mod_base = OTHER; note = uridine
  modified_base 16: mod_base = OTHER; note = guanosine
  modified_base 17: mod_base = OTHER; note = cytidine
  modified_base 18: mod_base = OTHER; note = uridine
  modified_base 19: mod_base = OTHER; note = uridine
  modified_base 20: mod_base = OTHER; note = 2'-deoxythymidine
  modified_base 21: mod_base = OTHER; note = 2'-deoxythymidine
  source 1..21: mol_type = other RNA
catcaattactacttgctttt

SEQ ID NO: 1521 - RNA, 21 nt, synthetic construct
  modified_base 20..21: mod_base = OTHER; note = thymine
  modified_base 1: mod_base = OTHER; note = cytidine
  modified_base 2: mod_base = cm
  modified_base 3: mod_base = OTHER; note = adenosine
  modified_base 4: mod_base = OTHER; note = uridine
  modified_base 5: mod_base = cm
  modified_base 6: mod_base = OTHER; note = adenosine
  modified_base 7: mod_base = OTHER; note = adenosine
  modified_base 8: mod_base = OTHER; note = uridine
  modified_base 9: mod_base = um
  modified_base 10: mod_base = OTHER; note = adenosine
  modified_base 11: mod_base = OTHER; note = cytidine
  modified_base 12: mod_base = um
  modified_base 13: mod_base = OTHER; note = adenosine
  modified_base 14: mod_base = OTHER; note = cytidine
  modified_base 15: mod_base = OTHER; note = uridine
  modified_base 16: mod_base = OTHER; note = uridine
  modified_base 17: mod_base = OTHER; note = guanosine
  modified_base 18: mod_base = OTHER; note = cytidine
  modified_base 19: mod_base = OTHER; note = uridine
  modified_base 20: mod_base = OTHER; note = 2'-deoxythymidine
  modified_base 21: mod_base = OTHER; note = 2'-deoxythymidine
  source 1..21: mol_type = other RNA
ccatcaattactacttgcttt

SEQ ID NO: 1522 - RNA, 21 nt, synthetic construct
  modified_base 20..21: mod_base = OTHER; note = thymine
  modified_base 1: mod_base = OTHER; note = uridine
  modified_base 2: mod_base = OTHER; note = cytidine
  modified_base 3: mod_base = cm
  modified_base 4: mod_base = OTHER; note = adenosine
  modified_base 5: mod_base = OTHER; note = uridine
  modified_base 6: mod_base = cm
  modified_base 7: mod_base = OTHER; note = adenosine
  modified_base 8: mod_base = OTHER; note = adenosine
  modified_base 9: mod_base = OTHER; note = uridine
  modified_base 10: mod_base = um
  modified_base 11: mod_base = OTHER; note = adenosine
  modified_base 12: mod_base = OTHER; note = cytidine
  modified_base 13: mod_base = um
  modified_base 14: mod_base = OTHER; note = adenosine
  modified_base 15: mod_base = OTHER; note = cytidine
  modified_base 16: mod_base = OTHER; note = uridine
  modified_base 17: mod_base = OTHER; note = uridine
  modified_base 18: mod_base = OTHER; note = guanosine
  modified_base 19: mod_base = OTHER; note = cytidine
  modified_base 20: mod_base = OTHER; note = 2'-deoxythymidine
  modified_base 21: mod_base = OTHER; note = 2'-deoxythymidine
  source 1..21: mol_type = other RNA
tccatcaattactacttgctt

SEQ ID NO: 1523 - RNA, 21 nt, synthetic construct
  modified_base 20..21: mod_base = OTHER; note = thymine
  modified_base 1: mod_base = OTHER; note = cytidine
  modified_base 2: mod_base = OTHER; note = uridine
  modified_base 3: mod_base = OTHER; note = cytidine
  modified_base 4: mod_base = cm
  modified_base 5: mod_base = OTHER; note = adenosine
  modified_base 6: mod_base = OTHER; note = uridine
  modified_base 7: mod_base = cm
  modified_base 8: mod_base = OTHER; note = adenosine
  modified_base 9: mod_base = OTHER; note = adenosine
  modified_base 10: mod_base = OTHER; note = uridine
  modified_base 11: mod_base = um
  modified_base 12: mod_base = OTHER; note = adenosine
  modified_base 13: mod_base = OTHER; note = cytidine
  modified_base 14: mod_base = um
  modified_base 15: mod_base = OTHER; note = adenosine
  modified_base 16: mod_base = OTHER; note = cytidine
  modified_base 17: mod_base = OTHER; note = uridine
  modified_base 18: mod_base = OTHER; note = uridine
  modified_base 19: mod_base = OTHER; note = guanosine
  modified_base 20: mod_base = OTHER; note = 2'-deoxythymidine
  modified_base 21: mod_base = OTHER; note = 2'-deoxythymidine
  source 1..21: mol_type = other RNA
ctccatcaattactacttgtt

SEQ ID NO: 1524 - RNA, 21 nt, synthetic construct
  modified_base 20..21: mod_base = OTHER; note = thymine
  modified_base 1: mod_base = OTHER; note = uridine
  modified_base 2: mod_base = OTHER; note = cytidine
  modified_base 3: mod_base = OTHER; note = uridine
  modified_base 4: mod_base = OTHER; note = cytidine
  modified_base 5: mod_base = cm
  modified_base 6: mod_base = OTHER; note = adenosine
  modified_base 7: mod_base = OTHER; note = uridine
  modified_base 8: mod_base = cm
  modified_base 9: mod_base = OTHER; note = adenosine
  modified_base 10: mod_base = OTHER; note = adenosine
  modified_base 11: mod_base = OTHER; note = uridine
  modified_base 12: mod_base = um
  modified_base 13: mod_base = OTHER; note = adenosine
  modified_base 14: mod_base = OTHER; note = cytidine
  modified_base 15: mod_base = um
  modified_base 16: mod_base = OTHER; note = adenosine
  modified_base 17: mod_base = OTHER; note = cytidine
  modified_base 18: mod_base = OTHER; note = uridine
  modified_base 19: mod_base = OTHER; note = uridine
  modified_base 20: mod_base = OTHER; note = 2'-deoxythymidine
  modified_base 21: mod_base = OTHER; note = 2'-deoxythymidine
  source 1..21: mol_type = other RNA
tctccatcaattactactttt

SEQ ID NO: 1525 - RNA, 21 nt, synthetic construct
  modified_base 20..21: mod_base = OTHER; note = thymine
  modified_base 1: mod_base = OTHER; note = uridine
  modified_base 2: mod_base = OTHER; note = uridine
  modified_base 3: mod_base = OTHER; note = cytidine
  modified_base 4: mod_base = OTHER; note = uridine
  modified_base 5: mod_base = OTHER; note = cytidine
  modified_base 6: mod_base = cm
  modified_base 7: mod_base = OTHER; note = adenosine
  modified_base 8: mod_base = OTHER; note = uridine
  modified_base 9: mod_base = cm
  modified_base 10: mod_base = OTHER; note = adenosine
  modified_base 11: mod_base = OTHER; note = adenosine
  modified_base 12: mod_base = OTHER; note = uridine
  modified_base 13: mod_base = um
  modified_base 14: mod_base = OTHER; note = adenosine
  modified_base 15: mod_base = OTHER; note = cytidine
  modified_base 16: mod_base = um
  modified_base 17: mod_base = OTHER; note = adenosine
  modified_base 18: mod_base = OTHER; note = cytidine
  modified_base 19: mod_base = OTHER; note = uridine
  modified_base 20: mod_base = OTHER; note = 2'-deoxythymidine
  modified_base 21: mod_base = OTHER; note = 2'-deoxythymidine
  source 1..21: mol_type = other RNA
ttctccatcaattactacttt

SEQ ID NO: 1526 - RNA, 21 nt, synthetic construct
  modified_base 20..21: mod_base = OTHER; note = thymine
  modified_base 1: mod_base = OTHER; note = uridine
  modified_base 2: mod_base = OTHER; note = uridine
  modified_base 3: mod_base = OTHER; note = uridine
  modified_base 4: mod_base = OTHER; note = cytidine
  modified_base 5: mod_base = OTHER; note = uridine
  modified_base 6: mod_base = OTHER; note = cytidine
  modified_base 7: mod_base = cm
  modified_base 8: mod_base = OTHER; note = adenosine
  modified_base 9: mod_base = OTHER; note = uridine
  modified_base 10: mod_base = cm
  modified_base 11: mod_base = OTHER; note = adenosine
  modified_base 12: mod_base = OTHER; note = adenosine
  modified_base 13: mod_base = OTHER; note = uridine
  modified_base 14: mod_base = um
  modified_base 15: mod_base = OTHER; note = adenosine
  modified_base 16: mod_base = OTHER; note = cytidine
  modified_base 17: mod_base = um
  modified_base 18: mod_base = OTHER; note = adenosine
  modified_base 19: mod_base = OTHER; note = cytidine
  modified_base 20: mod_base = OTHER; note = 2'-deoxythymidine
  modified_base 21: mod_base = OTHER; note = 2'-deoxythymidine
  source 1..21: mol_type = other RNA
tttctccatcaattactactt

SEQ ID NO: 1527 - RNA, 21 nt, synthetic construct
  modified_base 20..21: mod_base = OTHER; note = thymine
  modified_base 1: mod_base = OTHER; note = guanosine
  modified_base 2: mod_base = OTHER; note = uridine
  modified_base 3: mod_base = OTHER; note = uridine
  modified_base 4: mod_base = OTHER; note = uridine
  modified_base 5: mod_base = OTHER; note = cytidine
  modified_base 6: mod_base = OTHER; note = uridine
  modified_base 7: mod_base = OTHER; note = cytidine
  modified_base 8: mod_base = cm
  modified_base 9: mod_base = OTHER; note = adenosine
  modified_base 10: mod_base = OTHER; note = uridine
  modified_base 11: mod_base = cm
  modified_base 12: mod_base = OTHER; note = adenosine
  modified_base 13: mod_base = OTHER; note = adenosine
  modified_base 14: mod_base = OTHER; note = uridine
  modified_base 15: mod_base = um
  modified_base 16: mod_base = OTHER; note = adenosine
  modified_base 17: mod_base = OTHER; note = cytidine
  modified_base 18: mod_base = um
  modified_base 19: mod_base = OTHER; note = adenosine
  modified_base 20: mod_base = OTHER; note = 2'-deoxythymidine
  modified_base 21: mod_base = OTHER; note = 2'-deoxythymidine
  source 1..21: mol_type = other RNA
gtttctccatcaattactatt

SEQ ID NO: 1528 - RNA, 21 nt, synthetic construct
  modified_base 20..21: mod_base = OTHER; note = thymine
  modified_base 1: mod_base = OTHER; note = guanosine
  modified_base 2: mod_base = OTHER; note = guanosine
  modified_base 3: mod_base = OTHER; note = uridine
  modified_base 4: mod_base = OTHER; note = uridine
  modified_base 5: mod_base = OTHER; note = uridine
  modified_base 6: mod_base = OTHER; note = cytidine
  modified_base 7: mod_base = OTHER; note = uridine
  modified_base 8: mod_base = OTHER; note = cytidine
  modified_base 9: mod_base = cm
  modified_base 10: mod_base = OTHER; note = adenosine
  modified_base 11: mod_base = OTHER; note = uridine
  modified_base 12: mod_base = cm
  modified_base 13: mod_base = OTHER; note = adenosine
  modified_base 14: mod_base = OTHER; note = adenosine
  modified_base 15: mod_base = OTHER; note = uridine
  modified_base 16: mod_base = um
  modified_base 17: mod_base = OTHER; note = adenosine
  modified_base 18: mod_base = OTHER; note = cytidine
  modified_base 19: mod_base = OTHER; note = uridine
  modified_base 20: mod_base = OTHER; note = 2'-deoxythymidine
  modified_base 21: mod_base = OTHER; note = 2'-deoxythymidine
  source 1..21: mol_type = other RNA
ggtttctccatcaattacttt

SEQ ID NO: 1529 - RNA, 21 nt, synthetic construct
  modified_base 20..21: mod_base = OTHER; note = thymine
  modified_base 1: mod_base = OTHER; note = adenosine
  modified_base 2: mod_base = OTHER; note = guanosine
  modified_base 3: mod_base = OTHER; note = guanosine
  modified_base 4: mod_base = OTHER; note = uridine
  modified_base 5: mod_base = OTHER; note = uridine
  modified_base 6: mod_base = OTHER; note = uridine
  modified_base 7: mod_base = OTHER; note = cytidine
  modified_base 8: mod_base = OTHER; note = uridine
  modified_base 9: mod_base = OTHER; note = cytidine
  modified_base 10: mod_base = cm
  modified_base 11: mod_base = OTHER; note = adenosine
  modified_base 12: mod_base = OTHER; note = uridine
  modified_base 13: mod_base = cm
  modified_base 14: mod_base = OTHER; note = adenosine
  modified_base 15: mod_base = OTHER; note = adenosine
  modified_base 16: mod_base = OTHER; note = uridine
  modified_base 17: mod_base = um
  modified_base 18: mod_base = OTHER; note = adenosine
  modified_base 19: mod_base = OTHER; note = cytidine
  modified_base 20: mod_base = OTHER; note = 2'-deoxythymidine
  modified_base 21: mod_base = OTHER; note = 2'-deoxythymidine
  source 1..21: mol_type = other RNA
aggtttctccatcaattactt

SEQ ID NO: 1530 - RNA, 21 nt, synthetic construct
  modified_base 20..21: mod_base = OTHER; note = thymine
  modified_base 1: mod_base = cm
  modified_base 2: mod_base = OTHER; note = adenosine
  modified_base 3: mod_base = OTHER; note = guanosine
  modified_base 4: mod_base = OTHER; note = guanosine
  modified_base 5: mod_base = OTHER; note = uridine
  modified_base 6: mod_base = OTHER; note = uridine
  modified_base 7: mod_base = OTHER; note = uridine
  modified_base 8: mod_base = OTHER; note = cytidine
  modified_base 9: mod_base = OTHER; note = uridine
  modified_base 10: mod_base = OTHER; note = cytidine
  modified_base 11: mod_base = cm
  modified_base 12: mod_base = OTHER; note = adenosine
  modified_base 13: mod_base = OTHER; note = uridine
  modified_base 14: mod_base = cm
  modified_base 15: mod_base = OTHER; note = adenosine
  modified_base 16: mod_base = OTHER; note = adenosine
  modified_base 17: mod_base = OTHER; note = uridine
  modified_base 18: mod_base = um
  modified_base 19: mod_base = OTHER; note = adenosine
  modified_base 20: mod_base = OTHER; note = 2'-deoxythymidine
  modified_base 21: mod_base = OTHER; note = 2'-deoxythymidine
  source 1..21: mol_type = other RNA
caggtttctccatcaattatt

SEQ ID NO: 1531 - DNA, 21 bp, synthetic construct
  modified_base 1: mod_base = OTHER; note = adenosine
  modified_base 2: mod_base = cm
  modified_base 3: mod_base = OTHER; note = adenosine
  modified_base 4: mod_base = OTHER; note = guanosine
  modified_base 5: mod_base = OTHER; note = guanosine
  modified_base 6: mod_base = OTHER; note = uridine
  modified_base 7: mod_base = OTHER; note = uridine
  modified_base 8: mod_base = OTHER; note = uridine
  modified_base 9: mod_base = OTHER; note = cytidine
  modified_base 10: mod_base = OTHER; note = uridine
  modified_base 11: mod_base = OTHER; note = cytidine
  modified_base 12: mod_base = cm
  modified_base 13: mod_base = OTHER; note = adenosine
  modified_base 14: mod_base = OTHER; note = uridine
  modified_base 15: mod_base = cm
  modified_base 16: mod_base = OTHER; note = adenosine
  modified_base 17: mod_base = OTHER; note = adenosine
  modified_base 18: mod_base = OTHER; note = uridine
  modified_base 19: mod_base = OTHER; note = uridine
  modified_base 20: mod_base = OTHER; note = 2'-deoxythymidine
  modified_base 21: mod_base = OTHER; note = 2'-deoxythymidine
  source 1..21: mol_type = other DNA
acaggtttctccatcaatttt

SEQ ID NO: 1532 - DNA, 21 bp, synthetic construct
  modified_base 1: mod_base = OTHER; note = guanosine
  modified_base 2: mod_base = OTHER; note = adenosine
  modified_base 3: mod_base = cm
  modified_base 4: mod_base = OTHER; note = adenosine
  modified_base 5: mod_base = OTHER; note = guanosine
  modified_base 6: mod_base = OTHER; note = guanosine
  modified_base 7: mod_base = OTHER; note = uridine
  modified_base 8: mod_base = OTHER; note = uridine
  modified_base 9: mod_base = OTHER; note = uridine
  modified_base 10: mod_base = OTHER; note = cytidine
  modified_base 11: mod_base = OTHER; note = uridine
  modified_base 12: mod_base = OTHER; note = cytidine
  modified_base 13: mod_base = cm
  modified_base 14: mod_base = OTHER; note = adenosine
  modified_base 15: mod_base = OTHER; note = uridine
  modified_base 16: mod_base = cm
  modified_base 17: mod_base = OTHER; note = adenosine
  modified_base 18: mod_base = OTHER; note = adenosine
  modified_base 19: mod_base = OTHER; note = uridine
  modified_base 20: mod_base = OTHER; note = 2'-deoxythymidine
  modified_base 21: mod_base = OTHER; note = 2'-deoxythymidine
  source 1..21: mol_type = other DNA
gacaggtttctccatcaattt

SEQ ID NO: 1533 - DNA, 21 bp, synthetic construct
  modified_base 1: mod_base = OTHER; note = adenosine
  modified_base 2: mod_base = OTHER; note = guanosine
  modified_base 3: mod_base = OTHER; note = adenosine
  modified_base 4: mod_base = cm
  modified_base 5: mod_base = OTHER; note = adenosine
  modified_base 6: mod_base = OTHER; note = guanosine
  modified_base 7: mod_base = OTHER; note = guanosine
  modified_base 8: mod_base = OTHER; note = uridine
  modified_base 9: mod_base = OTHER; note = uridine
  modified_base 10: mod_base = OTHER; note = uridine
  modified_base 11: mod_base = OTHER; note = cytidine
  modified_base 12: mod_base = OTHER; note = uridine
  modified_base 13: mod_base = OTHER; note = cytidine
  modified_base 14: mod_base = cm
  modified_base 15: mod_base = OTHER; note = adenosine
  modified_base 16: mod_base = OTHER; note = uridine
  modified_base 17: mod_base = cm
  modified_base 18: mod_base = OTHER; note = adenosine
  modified_base 19: mod_base = OTHER; note = adenosine
  modified_base 20: mod_base = OTHER; note = 2'-deoxythymidine
  modified_base 21: mod_base = OTHER; note = 2'-deoxythymidine
  source 1..21: mol_type = other DNA
agacaggtttctccatcaatt

SEQ ID NO: 1534 - DNA, 21 bp, synthetic construct
  modified_base 1: mod_base = OTHER; note = guanosine
  modified_base 2: mod_base = OTHER; note = adenosine
  modified_base 3: mod_base = OTHER; note = guanosine
  modified_base 4: mod_base = OTHER; note = adenosine
  modified_base 5: mod_base = cm
  modified_base 6: mod_base = OTHER; note = adenosine
  modified_base 7: mod_base = OTHER; note = guanosine
  modified_base 8: mod_base = OTHER; note = guanosine
  modified_base 9: mod_base = OTHER; note = uridine
  modified_base 10: mod_base = OTHER; note = uridine
  modified_base 11: mod_base = OTHER; note = uridine
  modified_base 12: mod_base = OTHER; note = cytidine
  modified_base 13: mod_base = OTHER; note = uridine
  modified_base 14: mod_base = OTHER; note = cytidine
  modified_base 15: mod_base = cm
  modified_base 16: mod_base = OTHER; note = adenosine
  modified_base 17: mod_base = OTHER; note = uridine
  modified_base 18: mod_base = cm
  modified_base 19: mod_base = OTHER; note = adenosine
  modified_base 20: mod_base = OTHER; note = 2'-deoxythymidine
  modified_base 21: mod_base = OTHER; note = 2'-deoxythymidine
  source 1..21: mol_type = other DNA
gagacaggtttctccatcatt

SEQ ID NO: 1535 - DNA, 21 bp, synthetic construct
  modified_base 1: mod_base = OTHER; note = adenosine
  modified_base 2: mod_base = OTHER; note = guanosine
  modified_base 3: mod_base = OTHER; note = adenosine
  modified_base 4: mod_base = OTHER; note = guanosine
  modified_base 5: mod_base = OTHER; note = adenosine
  modified_base 6: mod_base = cm
  modified_base 7: mod_base = OTHER; note = adenosine
  modified_base 8: mod_base = OTHER; note = guanosine
  modified_base 9: mod_base = OTHER; note = guanosine
  modified_base 10: mod_base = OTHER; note = uridine
  modified_base 11: mod_base = OTHER; note = uridine
  modified_base 12: mod_base = OTHER; note = uridine
  modified_base 13: mod_base = OTHER; note = cytidine
  modified_base 14: mod_base = OTHER; note = uridine
  modified_base 15: mod_base = OTHER; note = cytidine
  modified_base 16: mod_base = cm
  modified_base 17: mod_base = OTHER; note = adenosine
  modified_base 18: mod_base = OTHER; note = uridine
  modified_base 19: mod_base = OTHER; note = cytidine
  modified_base 20: mod_base = OTHER; note = 2'-deoxythymidine
  modified_base 21: mod_base = OTHER; note = 2'-deoxythymidine
  source 1..21: mol_type = other DNA
agagacaggtttctccatctt

SEQ ID NO: 1536 - DNA, 21 bp, synthetic construct
  modified_base 1: mod_base = OTHER; note = adenosine
  modified_base 2: mod_base = OTHER; note = adenosine
  modified_base 3: mod_base = OTHER; note = guanosine
  modified_base 4: mod_base = OTHER; note = adenosine
  modified_base 5: mod_base = OTHER; note = guanosine
  modified_base 6: mod_base = OTHER; note = adenosine
  modified_base 7: mod_base = cm
  modified_base 8: mod_base = OTHER; note = adenosine
  modified_base 9: mod_base = OTHER; note = guanosine
  modified_base 10: mod_base = OTHER; note = guanosine
  modified_base 11: mod_base = OTHER; note = uridine
  modified_base 12: mod_base = OTHER; note = uridine
  modified_base 13: mod_base = OTHER; note = uridine
  modified_base 14: mod_base = OTHER; note = cytidine
  modified_base 15: mod_base = OTHER; note = uridine
  modified_base 16: mod_base = OTHER; note = cytidine
  modified_base 17: mod_base = cm
  modified_base 18: mod_base = OTHER; note = adenosine
  modified_base 19: mod_base = OTHER; note = uridine
  modified_base 20: mod_base = OTHER; note = 2'-deoxythymidine
  modified_base 21: mod_base = OTHER; note = 2'-deoxythymidine
  source 1..21: mol_type = other DNA
aagagacaggtttctccattt

SEQ ID NO: 1537 - DNA, 21 bp, synthetic construct
  modified_base 1: mod_base = cm
  modified_base 2: mod_base = OTHER; note = adenosine
  modified_base 3: mod_base = OTHER; note = adenosine
  modified_base 4: mod_base = OTHER; note = guanosine
  modified_base 5: mod_base = OTHER; note = adenosine
  modified_base 6: mod_base = OTHER; note = guanosine
  modified_base 7: mod_base = OTHER; note = adenosine
  modified_base 8: mod_base = cm
  modified_base 9: mod_base = OTHER; note = adenosine
  modified_base 10: mod_base = OTHER; note = guanosine
  modified_base 11: mod_base = OTHER; note = guanosine
  modified_base 12: mod_base = OTHER; note = uridine
  modified_base 13: mod_base = OTHER; note = uridine
  modified_base 14: mod_base = OTHER; note = uridine
  modified_base 15: mod_base = OTHER; note = cytidine
  modified_base 16: mod_base = OTHER; note = uridine
  modified_base 17: mod_base = OTHER; note = cytidine
  modified_base 18: mod_base = cm
  modified_base 19: mod_base = OTHER; note = adenosine
  modified_base 20: mod_base = OTHER; note = 2'-deoxythymidine
  modified_base 21: mod_base = OTHER; note = 2'-deoxythymidine
  source 1..21: mol_type = other DNA
caagagacaggtttctccatt

SEQ ID NO: 1538 - DNA, 21 bp, synthetic construct
  modified_base 1: mod_base = OTHER; note = cytidine
  modified_base 2: mod_base = cm
  modified_base 3: mod_base = OTHER; note = adenosine
  modified_base 4: mod_base = OTHER; note = adenosine
  modified_base 5: mod_base = OTHER; note = guanosine
  modified_base 6: mod_base = OTHER; note = adenosine
  modified_base 7: mod_base = OTHER; note = guanosine
  modified_base 8: mod_base = OTHER; note = adenosine
  modified_base 9: mod_base = cm
  modified_base 10: mod_base = OTHER; note = adenosine
  modified_base 11: mod_base = OTHER; note = guanosine
  modified_base 12: mod_base = OTHER; note = guanosine
  modified_base 13: mod_base = OTHER; note = uridine
  modified_base 14: mod_base = OTHER; note = uridine
  modified_base 15: mod_base = OTHER; note = uridine
  modified_base 16: mod_base = OTHER; note = cytidine
  modified_base 17: mod_base = OTHER; note = uridine
  modified_base 18: mod_base = OTHER; note = cytidine
  modified_base 19: mod_base = OTHER; note = cytidine
  modified_base 20: mod_base = OTHER; note = 2'-deoxythymidine
  modified_base 21: mod_base = OTHER; note = 2'-deoxythymidine
  source 1..21: mol_type = other DNA
ccaagagacaggtttctcctt

SEQ ID NO: 1539 - DNA, 21 bp, synthetic construct
  modified_base 1: mod_base = OTHER; note = uridine
  modified_base 2: mod_base = OTHER; note = cytidine
  modified_base 3: mod_base = cm
  modified_base 4: mod_base = OTHER; note = adenosine
  modified_base 5: mod_base = OTHER; note = adenosine
  modified_base 6: mod_base = OTHER; note = guanosine
  modified_base 7: mod_base = OTHER; note = adenosine
  modified_base 8: mod_base = OTHER; note = guanosine
  modified_base 9: mod_base = OTHER; note = adenosine
  modified_base 10: mod_base = cm
  modified_base 11: mod_base = OTHER; note = adenosine
  modified_base 12: mod_base = OTHER; note = guanosine
  modified_base 13: mod_base = OTHER; note = guanosine
  modified_base 14: mod_base = OTHER; note = uridine
  modified_base 15: mod_base = OTHER; note = uridine
  modified_base 16: mod_base = OTHER; note = uridine
  modified_base 17: mod_base = OTHER; note = cytidine
  modified_base 18: mod_base = OTHER; note = uridine
  modified_base 19: mod_base = OTHER; note = cytidine
  modified_base 20: mod_base = OTHER; note = 2'-deoxythymidine
  modified_base 21: mod_base = OTHER; note = 2'-deoxythymidine
  source 1..21: mol_type = other DNA
tccaagagacaggtttctctt

SEQ ID NO: 1540 - DNA, 21 bp, synthetic construct
  modified_base 1: mod_base = OTHER; note = adenosine
  modified_base 2: mod_base = OTHER; note = uridine
  modified_base 3: mod_base = OTHER; note = cytidine
  modified_base 4: mod_base = cm
  modified_base 5: mod_base = OTHER; note = adenosine
  modified_base 6: mod_base = OTHER; note = adenosine
  modified_base 7: mod_base = OTHER; note = guanosine
  modified_base 8: mod_base = OTHER; note = adenosine
  modified_base 9: mod_base = OTHER; note = guanosine
  modified_base 10: mod_base = OTHER; note = adenosine
  modified_base 11: mod_base = cm
  modified_base 12: mod_base = OTHER; note = adenosine
  modified_base 13: mod_base = OTHER; note = guanosine
  modified_base 14: mod_base = OTHER; note = guanosine
  modified_base 15: mod_base = OTHER; note = uridine
  modified_base 16: mod_base = OTHER; note = uridine
  modified_base 17: mod_base = OTHER; note = uridine
  modified_base 18: mod_base = OTHER; note = cytidine
  modified_base 19: mod_base = OTHER; note = uridine
  modified_base 20: mod_base = OTHER; note = 2'-deoxythymidine
  modified_base 21: mod_base = OTHER; note = 2'-deoxythymidine
  source 1..21: mol_type = other DNA
atccaagagacaggtttcttt

SEQ ID NO: 1541 - RNA, 21 nt, synthetic construct
  modified_base 20..21: mod_base = OTHER; note = thymine
  modified_base 1: mod_base = um
  modified_base 2: mod_base = OTHER; note = adenosine
  modified_base 3: mod_base = OTHER; note = uridine
  modified_base 4: mod_base = OTHER; note = cytidine
  modified_base 5: mod_base = cm
  modified_base 6: mod_base = OTHER; note = adenosine
  modified_base 7: mod_base = OTHER; note = adenosine
  modified_base 8: mod_base = OTHER; note = guanosine
  modified_base 9: mod_base = OTHER; note = adenosine
  modified_base 10: mod_base = OTHER; note = guanosine
  modified_base 11: mod_base = OTHER; note = adenosine
  modified_base 12: mod_base = cm
  modified_base 13: mod_base = OTHER; note = adenosine
  modified_base 14: mod_base = OTHER; note = guanosine
  modified_base 15: mod_base = OTHER; note = guanosine
  modified_base 16: mod_base = OTHER; note = uridine
  modified_base 17: mod_base = OTHER; note = uridine
  modified_base 18: mod_base = OTHER; note = uridine
  modified_base 19: mod_base = OTHER; note = cytidine
  modified_base 20: mod_base = OTHER; note = 2'-deoxythymidine
  modified_base 21: mod_base = OTHER; note = 2'-deoxythymidine
  source 1..21: mol_type = other RNA
tatccaagagacaggtttctt

SEQ ID NO: 1542 - RNA, 21 nt, synthetic construct
  modified_base 20..21: mod_base = OTHER; note = thymine
  modified_base 1: mod_base = OTHER; note = adenosine
  modified_base 2: mod_base = um
  modified_base 3: mod_base = OTHER; note = adenosine
  modified_base 4: mod_base = OTHER; note = uridine
  modified_base 5: mod_base = OTHER; note = cytidine
  modified_base 6: mod_base = cm
  modified_base 7: mod_base = OTHER; note = adenosine
  modified_base 8: mod_base = OTHER; note = adenosine
  modified_base 9: mod_base = OTHER; note = guanosine
  modified_base 10: mod_base = OTHER; note = adenosine
  modified_base 11: mod_base = OTHER; note = guanosine
  modified_base 12: mod_base = OTHER; note = adenosine
  modified_base 13: mod_base = cm
  modified_base 14: mod_base = OTHER; note = adenosine
  modified_base 15: mod_base = OTHER; note = guanosine
  modified_base 16: mod_base = OTHER; note = guanosine
  modified_base 17: mod_base = OTHER; note = uridine
  modified_base 18: mod_base = OTHER; note = uridine
  modified_base 19: mod_base = OTHER; note = uridine
  modified_base 20: mod_base = OTHER; note = 2'-deoxythymidine
  modified_base 21: mod_base = OTHER; note = 2'-deoxythymidine
  source 1..21: mol_type = other RNA
atatccaagagacaggttttt

SEQ ID NO: 1543 - RNA, 21 nt, synthetic construct
  modified_base 20..21: mod_base = OTHER; note = thymine
  modified_base 1: mod_base = OTHER; note = adenosine
  modified_base 2: mod_base = OTHER; note = adenosine
  modified_base 3: mod_base = um
  modified_base 4: mod_base = OTHER; note = adenosine
  modified_base 5: mod_base = OTHER; note = uridine
  modified_base 6: mod_base = OTHER; note = cytidine
  modified_base 7: mod_base = cm
  modified_base 8: mod_base = OTHER; note = adenosine
  modified_base 9: mod_base = OTHER; note = adenosine
  modified_base 10: mod_base = OTHER; note = guanosine
  modified_base 11: mod_base = OTHER; note = adenosine
  modified_base 12: mod_base = OTHER; note = guanosine
  modified_base 13: mod_base = OTHER; note = adenosine
  modified_base 14: mod_base = cm
  modified_base 15: mod_base = OTHER; note = adenosine
  modified_base 16: mod_base = OTHER; note = guanosine
  modified_base 17: mod_base = OTHER; note = guanosine
  modified_base 18: mod_base = OTHER; note = uridine
  modified_base 19: mod_base = OTHER; note = uridine
  modified_base 20: mod_base = OTHER; note = 2'-deoxythymidine
  modified_base 21: mod_base = OTHER; note = 2'-deoxythymidine
  source 1..21: mol_type = other RNA
aatatccaagagacaggtttt

SEQ ID NO: 1544 - RNA, 21 nt, synthetic construct
  modified_base 20..21: mod_base = OTHER; note = thymine
  modified_base 1: mod_base = OTHER; note = guanosine
  modified_base 2: mod_base = OTHER; note = adenosine
  modified_base 3: mod_base = OTHER; note = adenosine
  modified_base 4: mod_base = um
  modified_base 5: mod_base = OTHER; note = adenosine
  modified_base 6: mod_base = OTHER; note = uridine
  modified_base 7: mod_base = OTHER; note = cytidine
  modified_base 8: mod_base = cm
  modified_base 9: mod_base = OTHER; note = adenosine
  modified_base 10: mod_base = OTHER; note = adenosine
  modified_base 11: mod_base = OTHER; note = guanosine
  modified_base 12: mod_base = OTHER; note = adenosine
  modified_base 13: mod_base = OTHER; note = guanosine
  modified_base 14: mod_base = OTHER; note = adenosine
  modified_base 15: mod_base = cm
  modified_base 16: mod_base = OTHER; note = adenosine
  modified_base 17: mod_base = OTHER; note = guanosine
  modified_base 18: mod_base = OTHER; note = guanosine
  modified_base 19: mod_base = OTHER; note = uridine
  modified_base 20: mod_base = OTHER; note = 2'-deoxythymidine
  modified_base 21: mod_base = OTHER; note = 2'-deoxythymidine
  source 1..21: mol_type = other RNA
gaatatccaagagacaggttt

SEQ ID NO: 1545 - RNA, 21 nt, synthetic construct
  modified_base 20..21: mod_base = OTHER; note = thymine
  modified_base 1: mod_base = OTHER; note = adenosine
  modified_base 2: mod_base = OTHER; note = guanosine
  modified_base 3: mod_base = OTHER; note = adenosine
  modified_base 4: mod_base = OTHER; note = adenosine
  modified_base 5: mod_base = um
  modified_base 6: mod_base = OTHER; note = adenosine
  modified_base 7: mod_base = OTHER; note = uridine
  modified_base 8: mod_base = OTHER; note = cytidine
  modified_base 9: mod_base = cm
  modified_base 10: mod_base = OTHER; note = adenosine
  modified_base 11: mod_base = OTHER; note = adenosine
  modified_base 12: mod_base = OTHER; note = guanosine
  modified_base 13: mod_base = OTHER; note = adenosine
  modified_base 14: mod_base = OTHER; note = guanosine
  modified_base 15: mod_base = OTHER; note = adenosine
  modified_base 16: mod_base = cm
  modified_base 17: mod_base = OTHER; note = adenosine
  modified_base 18: mod_base = OTHER; note = guanosine
  modified_base 19: mod_base = OTHER; note = guanosine
  modified_base 20: mod_base = OTHER; note = 2'-deoxythymidine
  modified_base 21: mod_base = OTHER; note = 2'-deoxythymidine
  source 1..21: mol_type = other RNA
agaatatccaagagacaggtt

SEQ ID NO: 1546 - RNA, 21 nt, synthetic construct
  modified_base 20..21: mod_base = OTHER; note = thymine
  modified_base 1: mod_base = OTHER; note = guanosine
  modified_base 2: mod_base = OTHER; note = adenosine
  modified_base 3: mod_base = OTHER; note = guanosine
  modified_base 4: mod_base = OTHER; note = adenosine
  modified_base 5: mod_base = OTHER; note = adenosine
  modified_base 6: mod_base = um
  modified_base 7: mod_base = OTHER; note = adenosine
  modified_base 8: mod_base = OTHER; note = uridine
  modified_base 9: mod_base = OTHER; note = cytidine
  modified_base 10: mod_base = cm
  modified_base 11: mod_base = OTHER; note = adenosine
  modified_base 12: mod_base = OTHER; note = adenosine
  modified_base 13: mod_base = OTHER; note = guanosine
  modified_base 14: mod_base = OTHER; note = adenosine
  modified_base 15: mod_base = OTHER; note = guanosine
  modified_base 16: mod_base = OTHER; note = adenosine
  modified_base 17: mod_base = cm
  modified_base 18: mod_base = OTHER; note = adenosine
  modified_base 19: mod_base = OTHER; note = guanosine
  modified_base 20: mod_base = OTHER; note = 2'-deoxythymidine
  modified_base 21: mod_base = OTHER; note = 2'-deoxythymidine
  source 1..21: mol_type = other RNA
gagaatatccaagagacagtt

SEQ ID NO: 1547 - RNA, 21 nt, synthetic construct
  modified_base 20..21: mod_base = OTHER; note = thymine
  modified_base 1: mod_base = OTHER; note = cytidine
  modified_base 2: mod_base = OTHER; note = guanosine
  modified_base 3: mod_base = OTHER; note = adenosine
  modified_base 4: mod_base = OTHER; note = guanosine
  modified_base 5: mod_base = OTHER; note = adenosine
  modified_base 6: mod_base = OTHER; note = adenosine
  modified_base 7: mod_base = um
  modified_base 8: mod_base = OTHER; note = adenosine
  modified_base 9: mod_base = OTHER; note = uridine
  modified_base 10: mod_base = OTHER; note = cytidine
  modified_base 11: mod_base = cm
  modified_base 12: mod_base = OTHER; note = adenosine
  modified_base 13: mod_base = OTHER; note = adenosine
  modified_base 14: mod_base = OTHER; note = guanosine
  modified_base 15: mod_base = OTHER; note = adenosine
  modified_base 16: mod_base = OTHER; note = guanosine
  modified_base 17: mod_base = OTHER; note = adenosine
  modified_base 18: mod_base = cm
  modified_base 19: mod_base = OTHER; note = adenosine
  modified_base 20: mod_base = OTHER; note = 2'-deoxythymidine
  modified_base 21: mod_base = OTHER; note = 2'-deoxythymidine
  source 1..21: mol_type = other RNA
cgagaatatccaagagacatt

SEQ ID NO: 1548 - RNA, 21 nt, synthetic construct
  modified_base 20..21: mod_base = OTHER; note = thymine
  modified_base 1: mod_base = OTHER; note = uridine
  modified_base 2: mod_base = OTHER; note = cytidine
  modified_base 3: mod_base = OTHER; note = guanosine
  modified_base 4: mod_base = OTHER; note = adenosine
  modified_base 5: mod_base = OTHER; note = guanosine
  modified_base 6: mod_base = OTHER; note = adenosine
  modified_base 7: mod_base = OTHER; note = adenosine
  modified_base 8: mod_base = um
  modified_base 9: mod_base = OTHER; note = adenosine
  modified_base 10: mod_base = OTHER; note = uridine
  modified_base 11: mod_base = OTHER; note = cytidine
  modified_base 12: mod_base = cm
  modified_base 13: mod_base = OTHER; note = adenosine
  modified_base 14: mod_base = OTHER; note = adenosine
  modified_base 15: mod_base = OTHER; note = guanosine
  modified_base 16: mod_base = OTHER; note = adenosine
  modified_base 17: mod_base = OTHER; note = guanosine
  modified_base 18: mod_base = OTHER; note = adenosine
  modified_base 19: mod_base = OTHER; note = cytidine
  modified_base 20: mod_base = OTHER; note = 2'-deoxythymidine
  modified_base 21: mod_base = OTHER; note = 2'-deoxythymidine
  source 1..21: mol_type = other RNA
tcgagaatatccaagagactt

SEQ ID NO: 1549 - RNA, 21 nt, synthetic construct
  modified_base 20..21: mod_base = OTHER; note = thymine
  modified_base 1: mod_base = OTHER; note = guanosine
  modified_base 2: mod_base = OTHER; note = uridine
  modified_base 3: mod_base = OTHER; note = cytidine
  modified_base 4: mod_base = OTHER; note = guanosine
  modified_base 5: mod_base = OTHER; note = adenosine
  modified_base 6: mod_base = OTHER; note = guanosine
  modified_base 7: mod_base = OTHER; note = adenosine
  modified_base 8: mod_base = OTHER; note = adenosine
  modified_base 9: mod_base = um
  modified_base 10: mod_base = OTHER; note = adenosine
  modified_base 11: mod_base = OTHER; note = uridine
  modified_base 12: mod_base = OTHER; note = cytidine
  modified_base 13: mod_base = cm
  modified_base 14: mod_base = OTHER; note = adenosine
  modified_base 15: mod_base = OTHER; note = adenosine
  modified_base 16: mod_base = OTHER; note = guanosine
  modified_base 17: mod_base = OTHER; note = adenosine
  modified_base 18: mod_base = OTHER; note = guanosine
  modified_base 19: mod_base = OTHER; note = adenosine
  modified_base 20: mod_base = OTHER; note = 2'-deoxythymidine
  modified_base 21: mod_base = OTHER; note = 2'-deoxythymidine
  source 1..21: mol_type = other RNA
gtcgagaatatccaagagatt

SEQ ID NO: 1550 - RNA, 21 nt, synthetic construct
  modified_base 20..21: mod_base = OTHER; note = thymine
  modified_base 1: mod_base = OTHER; note = uridine
  modified_base 2: mod_base = OTHER; note = guanosine
  modified_base 3: mod_base = OTHER; note = uridine
  modified_base 4: mod_base = OTHER; note = cytidine
  modified_base 5: mod_base = OTHER; note = guanosine
  modified_base 6: mod_base = OTHER; note = adenosine
  modified_base 7: mod_base = OTHER; note = guanosine
  modified_base 8: mod_base = OTHER; note = adenosine
  modified_base 9: mod_base = OTHER; note = adenosine
  modified_base 10: mod_base = um
  modified_base 11: mod_base = OTHER; note = adenosine
  modified_base 12: mod_base = OTHER; note = uridine
  modified_base 13: mod_base = OTHER; note = cytidine
  modified_base 14: mod_base = cm
  modified_base 15: mod_base = OTHER; note = adenosine
  modified_base 16: mod_base = OTHER; note = adenosine
  modified_base 17: mod_base = OTHER; note = guanosine
  modified_base 18: mod_base = OTHER; note = adenosine
  modified_base 19: mod_base = OTHER; note = guanosine
  modified_base 20: mod_base = OTHER; note = 2'-deoxythymidine
  modified_base 21: mod_base = OTHER; note = 2'-deoxythymidine
  source 1..21: mol_type = other RNA
tgtcgagaatatccaagagtt

SEQ ID NO: 1551 - RNA, 21 nt, synthetic construct
  modified_base 20..21: mod_base = OTHER; note = thymine
  modified_base 1: mod_base = OTHER; note = guanosine
  modified_base 2: mod_base = OTHER; note = uridine
  modified_base 3: mod_base = OTHER; note = guanosine
  modified_base 4: mod_base = OTHER; note = uridine
  modified_base 5: mod_base = OTHER; note = cytidine
  modified_base 6: mod_base = OTHER; note = guanosine
  modified_base 7: mod_base = OTHER; note = adenosine
  modified_base 8: mod_base = OTHER; note = guanosine
  modified_base 9: mod_base = OTHER; note = adenosine
  modified_base 10: mod_base = OTHER; note = adenosine
  modified_base 11: mod_base = um
  modified_base 12: mod_base = OTHER; note = adenosine
  modified_base 13: mod_base = OTHER; note = uridine
  modified_base 14: mod_base = OTHER; note = cytidine
  modified_base 15: mod_base = cm
  modified_base 16: mod_base = OTHER; note = adenosine
  modified_base 17: mod_base = OTHER; note = adenosine
  modified_base 18: mod_base = OTHER; note = guanosine
  modified_base 19: mod_base = OTHER; note = adenosine
  modified_base 20: mod_base = OTHER; note = 2'-deoxythymidine
  modified_base 21: mod_base = OTHER; note = 2'-deoxythymidine
  source 1..21: mol_type = other RNA
gtgtcgagaatatccaagatt

SEQ ID NO: 1552 - RNA, 21 nt, synthetic construct
  modified_base 20..21: mod_base = OTHER; note = thymine
  modified_base 1: mod_base = OTHER; note = uridine
  modified_base 2: mod_base = OTHER; note = guanosine
  modified_base 3: mod_base = OTHER; note = uridine
  modified_base 4: mod_base = OTHER; note = guanosine
  modified_base 5: mod_base = OTHER; note = uridine
  modified_base 6: mod_base = OTHER; note = cytidine
  modified_base 7: mod_base = OTHER; note = guanosine
  modified_base 8: mod_base = OTHER; note = adenosine
  modified_base 9: mod_base = OTHER; note = guanosine
  modified_base 10: mod_base = OTHER; note = adenosine
  modified_base 11: mod_base = OTHER; note = adenosine
  modified_base 12: mod_base = um
  modified_base 13: mod_base = OTHER; note = adenosine
  modified_base 14: mod_base = OTHER; note = uridine
  modified_base 15: mod_base = OTHER; note = cytidine
  modified_base 16: mod_base = cm
  modified_base 17: mod_base = OTHER; note = adenosine
  modified_base 18: mod_base = OTHER; note = adenosine
  modified_base 19: mod_base = OTHER; note = guanosine
  modified_base 20: mod_base = OTHER; note = 2'-deoxythymidine
  modified_base 21: mod_base = OTHER; note = 2'-deoxythymidine
  source 1..21: mol_type = other RNA
tgtgtcgagaatatccaagtt

SEQ ID NO: 1553 - RNA, 21 nt, synthetic construct
  modified_base 20..21: mod_base = OTHER; note = thymine
  modified_base 1: mod_base = OTHER; note = uridine
  modified_base 2: mod_base = OTHER; note = cytidine
  modified_base 3: mod_base = OTHER; note = cytidine
  modified_base 4: mod_base = OTHER; note = cytidine
  modified_base 5: mod_base = OTHER; note = uridine
  modified_base 6: mod_base = cm
  modified_base 7: mod_base = OTHER; note = adenosine
  modified_base 8: mod_base = OTHER; note = uridine
  modified_base 9: mod_base = OTHER; note = uridine
  modified_base 10: mod_base = OTHER; note = guanosine
  modified_base 11: mod_base = cm
  modified_base 12: mod_base = OTHER; note = adenosine
  modified_base 13: mod_base = OTHER; note = cytidine
  modified_base 14: mod_base = OTHER; note = uridine
  modified_base 15: mod_base = OTHER; note = guanosine
  modified_base 16: mod_base = um
  modified_base 17: mod_base = OTHER; note = adenosine
  modified_base 18: mod_base = OTHER; note = cytidine
  modified_base 19: mod_base = OTHER; note = uridine
  modified_base 20: mod_base = OTHER; note = 2'-deoxythymidine
  modified_base 21: mod_base = OTHER; note = 2'-deoxythymidine
  source 1..21: mol_type = other RNA
tccctcattgcactgtacttt

SEQ ID NO: 1554 - RNA, 21 nt, synthetic construct
  modified_base 20..21: mod_base = OTHER; note = thymine
  modified_base 1: mod_base = OTHER; note = guanosine
  modified_base 2: mod_base = OTHER; note = uridine
  modified_base 3: mod_base = OTHER; note = cytidine
  modified_base 4: mod_base = OTHER; note = cytidine
  modified_base 5: mod_base = OTHER; note = cytidine
  modified_base 6: mod_base = OTHER; note = uridine
  modified_base 7: mod_base = cm
  modified_base 8: mod_base = OTHER; note = adenosine
  modified_base 9: mod_base = OTHER; note = uridine
  modified_base 10: mod_base = OTHER; note = uridine
  modified_base 11: mod_base = OTHER; note = guanosine
  modified_base 12: mod_base = cm
  modified_base 13: mod_base = OTHER; note = adenosine
  modified_base 14: mod_base = OTHER; note = cytidine
  modified_base 15: mod_base = OTHER; note = uridine
  modified_base 16: mod_base = OTHER; note = guanosine
  modified_base 17: mod_base = um
  modified_base 18: mod_base = OTHER; note = adenosine
  modified_base 19: mod_base = OTHER; note = cytidine
  modified_base 20: mod_base = OTHER; note = 2'-deoxythymidine
  modified_base 21: mod_base = OTHER; note = 2'-deoxythymidine
  source 1..21: mol_type = other RNA
gtccctcattgcactgtactt

SEQ ID NO: 1555 - RNA, 21 nt, synthetic construct
  modified_base 20..21: mod_base = OTHER; note = thymine
  modified_base 1: mod_base = OTHER; note = guanosine
  modified_base 2: mod_base = OTHER; note = guanosine
  modified_base 3: mod_base = OTHER; note = uridine
  modified_base 4: mod_base = OTHER; note = cytidine
  modified_base 5: mod_base = OTHER; note = cytidine
  modified_base 6: mod_base = OTHER; note = cytidine
  modified_base 7: mod_base = OTHER; note = uridine
  modified_base 8: mod_base = cm
  modified_base 9: mod_base = OTHER; note = adenosine
  modified_base 10: mod_base = OTHER; note = uridine
  modified_base 11: mod_base = OTHER; note = uridine
  modified_base 12: mod_base = OTHER; note = guanosine
  modified_base 13: mod_base = cm
  modified_base 14: mod_base = OTHER; note = adenosine
  modified_base 15: mod_base = OTHER; note = cytidine
  modified_base 16: mod_base = OTHER; note = uridine
  modified_base 17: mod_base = OTHER; note = guanosine
  modified_base 18: mod_base = um
  modified_base 19: mod_base = OTHER; note = adenosine
  modified_base 20: mod_base = OTHER; note = 2'-deoxythymidine
  modified_base 21: mod_base = OTHER; note = 2'-deoxythymidine
  source 1..21: mol_type = other RNA
ggtccctcattgcactgtatt

SEQ ID NO: 1556 - DNA, 21 bp, synthetic construct
  modified_base 1: mod_base = OTHER; note = uridine
  modified_base 2: mod_base = OTHER; note = guanosine
  modified_base 3: mod_base = OTHER; note = guanosine
  modified_base 4: mod_base = OTHER; note = uridine
  modified_base 5: mod_base = OTHER; note = cytidine
  modified_base 6: mod_base = OTHER; note = cytidine
  modified_base 7: mod_base = OTHER; note = cytidine
  modified_base 8: mod_base = OTHER; note = uridine
  modified_base 9: mod_base = cm
  modified_base 10: mod_base = OTHER; note = adenosine
  modified_base 11: mod_base = OTHER; note = uridine
  modified_base 12: mod_base = OTHER; note = uridine
  modified_base 13: mod_base = OTHER; note = guanosine
  modified_base 14: mod_base = cm
  modified_base 15: mod_base = OTHER; note = adenosine
  modified_base 16: mod_base = OTHER; note = cytidine
  modified_base 17: mod_base = OTHER; note = uridine
  modified_base 18: mod_base = OTHER; note = guanosine
  modified_base 19: mod_base = OTHER; note = uridine
  modified_base 20: mod_base = OTHER; note = 2'-deoxythymidine
  modified_base 21: mod_base = OTHER; note = 2'-deoxythymidine
  source 1..21: mol_type = other DNA
tggtccctcattgcactgttt

SEQ ID NO: 1557 - DNA, 21 bp, synthetic construct
  modified_base 1: mod_base = OTHER; note = cytidine
  modified_base 2: mod_base = OTHER; note = uridine
  modified_base 3: mod_base = OTHER; note = guanosine
  modified_base 4: mod_base = OTHER; note = guanosine
  modified_base 5: mod_base = OTHER; note = uridine
  modified_base 6: mod_base = OTHER; note = cytidine
  modified_base 7: mod_base = OTHER; note = cytidine
  modified_base 8: mod_base = OTHER; note = cytidine
  modified_base 9: mod_base = OTHER; note = uridine
  modified_base 10: mod_base = cm
  modified_base 11: mod_base = OTHER; note = adenosine
  modified_base 12: mod_base = OTHER; note = uridine
  modified_base 13: mod_base = OTHER; note = uridine
  modified_base 14: mod_base = OTHER; note = guanosine
  modified_base 15: mod_base = cm
  modified_base 16: mod_base = OTHER; note = adenosine
  modified_base 17: mod_base = OTHER; note = cytidine
  modified_base 18: mod_base = OTHER; note = uridine
  modified_base 19: mod_base = OTHER; note = guanosine
  modified_base 20: mod_base = OTHER; note = 2'-deoxythymidine
  modified_base 21: mod_base = OTHER; note = 2'-deoxythymidine
  source 1..21: mol_type = other DNA
ctggtccctcattgcactgtt

SEQ ID NO: 1558 - DNA, 21 bp, synthetic construct
  modified_base 1: mod_base = OTHER; note = adenosine
  modified_base 2: mod_base = OTHER; note = cytidine
  modified_base 3: mod_base = OTHER; note = uridine
  modified_base 4: mod_base = OTHER; note = guanosine
  modified_base 5: mod_base = OTHER; note = guanosine
  modified_base 6: mod_base = OTHER; note = uridine
  modified_base 7: mod_base = OTHER; note = cytidine
  modified_base 8: mod_base = OTHER; note = cytidine
  modified_base 9: mod_base = OTHER; note = cytidine
  modified_base 10: mod_base = OTHER; note = uridine
  modified_base 11: mod_base = cm
  modified_base 12: mod_base = OTHER; note = adenosine
  modified_base 13: mod_base = OTHER; note = uridine
  modified_base 14: mod_base = OTHER; note = uridine
  modified_base 15: mod_base = OTHER; note = guanosine
  modified_base 16: mod_base = cm
  modified_base 17: mod_base = OTHER; note = adenosine
  modified_base 18: mod_base = OTHER; note = cytidine
  modified_base 19: mod_base = OTHER; note = uridine
  modified_base 20: mod_base = OTHER; note = 2'-deoxythymidine
  modified_base 21: mod_base = OTHER; note = 2'-deoxythymidine
  source 1..21: mol_type = other DNA
actggtccctcattgcacttt

SEQ ID NO: 1559 - RNA, 21 nt, synthetic construct
  modified_base 20..21: mod_base = OTHER; note = thymine
  modified_base 1: mod_base = um
  modified_base 2: mod_base = OTHER; note = adenosine
  modified_base 3: mod_base = OTHER; note = cytidine
  modified_base 4: mod_base = OTHER; note = uridine
  modified_base 5: mod_base = OTHER; note = guanosine
  modified_base 6: mod_base = OTHER; note = guanosine
  modified_base 7: mod_base = OTHER; note = uridine
  modified_base 8: mod_base = OTHER; note = cytidine
  modified_base 9: mod_base = OTHER; note = cytidine
  modified_base 10: mod_base = OTHER; note = cytidine
  modified_base 11: mod_base = OTHER; note = uridine
  modified_base 12: mod_base = cm
  modified_base 13: mod_base = OTHER; note = adenosine
  modified_base 14: mod_base = OTHER; note = uridine
  modified_base 15: mod_base = OTHER; note = uridine
  modified_base 16: mod_base = OTHER; note = guanosine
  modified_base 17: mod_base = cm
  modified_base 18: mod_base = OTHER; note = adenosine
  modified_base 19: mod_base = OTHER; note = cytidine
  modified_base 20: mod_base = OTHER; note = 2'-deoxythymidine
  modified_base 21: mod_base = OTHER; note = 2'-deoxythymidine
  source 1..21: mol_type = other RNA
tactggtccctcattgcactt

SEQ ID NO: 1560 - RNA, 21 nt, synthetic construct
  modified_base 20..21: mod_base = OTHER; note = thymine
  modified_base 1: mod_base = OTHER; note = guanosine
  modified_base 2: mod_base = um
  modified_base 3: mod_base = OTHER; note = adenosine
  modified_base 4: mod_base = OTHER; note = cytidine
  modified_base 5: mod_base = OTHER; note = uridine
  modified_base 6: mod_base = OTHER; note = guanosine
  modified_base 7: mod_base = OTHER; note = guanosine
  modified_base 8: mod_base = OTHER; note = uridine
  modified_base 9: mod_base = OTHER; note = cytidine
  modified_base 10: mod_base = OTHER; note = cytidine
  modified_base 11: mod_base = OTHER; note = cytidine
  modified_base 12: mod_base = OTHER; note = uridine
  modified_base 13: mod_base = cm
  modified_base 14: mod_base = OTHER; note = adenosine
  modified_base 15: mod_base = OTHER; note = uridine
  modified_base 16: mod_base = OTHER; note = uridine
  modified_base 17: mod_base = OTHER; note = guanosine
  modified_base 18: mod_base = cm
  modified_base 19: mod_base = OTHER; note = adenosine
  modified_base 20: mod_base = OTHER; note = 2'-deoxythymidine
  modified_base 21: mod_base = OTHER; note = 2'-deoxythymidine
  source 1..21: mol_type = other RNA
gtactggtccctcattgcatt

SEQ ID NO: 1561 - RNA, 21 nt, synthetic construct
  modified_base 20..21: mod_base = OTHER; note = thymine
  modified_base 1: mod_base = OTHER; note = uridine
  modified_base 2: mod_base = OTHER; note = guanosine
  modified_base 3: mod_base = um
  modified_base 4: mod_base = OTHER; note = adenosine
  modified_base 5: mod_base = OTHER; note = cytidine
  modified_base 6: mod_base = OTHER; note = uridine
  modified_base 7: mod_base = OTHER; note = guanosine
  modified_base 8: mod_base = OTHER; note = guanosine
  modified_base 9: mod_base = OTHER; note = uridine
  modified_base 10: mod_base = OTHER; note = cytidine
  modified_base 11: mod_base = OTHER; note = cytidine
  modified_base 12: mod_base = OTHER; note = cytidine
  modified_base 13: mod_base = OTHER; note = uridine
  modified_base 14: mod_base = cm
  modified_base 15: mod_base = OTHER; note = adenosine
  modified_base 16: mod_base = OTHER; note = uridine
  modified_base 17: mod_base = OTHER; note = uridine
  modified_base 18: mod_base = OTHER; note = guanosine
  modified_base 19: mod_base = OTHER; note = cytidine
  modified_base 20: mod_base = OTHER; note = 2'-deoxythymidine
  modified_base 21: mod_base = OTHER; note = 2'-deoxythymidine
  source 1..21: mol_type = other RNA
tgtactggtccctcattgctt

SEQ ID NO: 1562 - RNA, 21 nt, synthetic construct
  modified_base 20..21: mod_base = OTHER; note = thymine
  modified_base 1: mod_base = OTHER; note = adenosine
  modified_base 2: mod_base = OTHER; note = uridine
  modified_base 3: mod_base = OTHER; note = guanosine
  modified_base 4: mod_base = um
  modified_base 5: mod_base = OTHER; note = adenosine
  modified_base 6: mod_base = OTHER; note = cytidine
  modified_base 7: mod_base = OTHER; note = uridine
  modified_base 8: mod_base = OTHER; note = guanosine
  modified_base 9: mod_base = OTHER; note = guanosine
  modified_base 10: mod_base = OTHER; note = uridine
  modified_base 11: mod_base = OTHER; note = cytidine
  modified_base 12: mod_base = OTHER; note = cytidine
  modified_base 13: mod_base = OTHER; note = cytidine
  modified_base 14: mod_base = OTHER; note = uridine
  modified_base 15: mod_base = cm
  modified_base 16: mod_base = OTHER; note = adenosine
  modified_base 17: mod_base = OTHER; note = uridine
  modified_base 18: mod_base = OTHER; note = uridine
  modified_base 19: mod_base = OTHER; note = guanosine
  modified_base 20: mod_base = OTHER; note = 2'-deoxythymidine
  modified_base 21: mod_base = OTHER; note = 2'-deoxythymidine
  source 1..21: mol_type = other RNA
atgtactggtccctcattgtt

SEQ ID NO: 1563 - RNA, 21 nt, synthetic construct
  modified_base 20..21: mod_base = OTHER; note = thymine
  modified_base 1: mod_base = cm
  modified_base 2: mod_base = OTHER; note = adenosine
  modified_base 3: mod_base = OTHER; note = uridine
  modified_base 4: mod_base = OTHER; note = guanosine
  modified_base 5: mod_base = um
  modified_base 6: mod_base = OTHER; note = adenosine
  modified_base 7: mod_base = OTHER; note = cytidine
  modified_base 8: mod_base = OTHER; note = uridine
  modified_base 9: mod_base = OTHER; note = guanosine
  modified_base 10: mod_base = OTHER; note = guanosine
  modified_base 11: mod_base = OTHER; note = uridine
  modified_base 12: mod_base = OTHER; note = cytidine
  modified_base 13: mod_base = OTHER; note = cytidine
  modified_base 14: mod_base = OTHER; note = cytidine
  modified_base 15: mod_base = OTHER; note = uridine
  modified_base 16: mod_base = cm
  modified_base 17: mod_base = OTHER; note = adenosine
  modified_base 18: mod_base = OTHER; note = uridine
  modified_base 19: mod_base = OTHER; note = uridine
  modified_base 20: mod_base = OTHER; note = 2'-deoxythymidine
  modified_base 21: mod_base = OTHER; note = 2'-deoxythymidine
  source 1..21: mol_type = other RNA
catgtactggtccctcatttt

SEQ ID NO: 1564 - RNA, 21 nt, synthetic construct
  modified_base 20..21: mod_base = OTHER; note = thymine
  modified_base 1: mod_base = OTHER; note = uridine
  modified_base 2: mod_base = cm
  modified_base 3: mod_base = OTHER; note = adenosine
  modified_base 4: mod_base = OTHER; note = uridine
  modified_base 5: mod_base = OTHER; note = guanosine
  modified_base 6: mod_base = um
  modified_base 7: mod_base = OTHER; note = adenosine
  modified_base 8: mod_base = OTHER; note = cytidine
  modified_base 9: mod_base = OTHER; note = uridine
  modified_base 10: mod_base = OTHER; note = guanosine
  modified_base 11: mod_base = OTHER; note = guanosine
  modified_base 12: mod_base = OTHER; note = uridine
  modified_base 13: mod_base = OTHER; note = cytidine
  modified_base 14: mod_base = OTHER; note = cytidine
  modified_base 15: mod_base = OTHER; note = cytidine
  modified_base 16: mod_base = OTHER; note = uridine
  modified_base 17: mod_base = cm
  modified_base 18: mod_base = OTHER; note = adenosine
  modified_base 19: mod_base = OTHER; note = uridine
  modified_base 20: mod_base = OTHER; note = 2'-deoxythymidine
  modified_base 21: mod_base = OTHER; note = 2'-deoxythymidine
  source 1..21: mol_type = other RNA
tcatgtactggtccctcattt

SEQ ID NO: 1565 - RNA, 21 nt, synthetic construct
  modified_base 20..21: mod_base = OTHER; note = thymine
  modified_base 1: mod_base = OTHER; note = cytidine
  modified_base 2: mod_base = OTHER; note = uridine
  modified_base 3: mod_base = cm
  modified_base 4: mod_base = OTHER; note = adenosine
  modified_base 5: mod_base = OTHER; note = uridine
  modified_base 6: mod_base = OTHER; note = guanosine
  modified_base 7: mod_base = um
  modified_base 8: mod_base = OTHER; note = adenosine
  modified_base 9: mod_base = OTHER; note = cytidine
  modified_base 10: mod_base = OTHER; note = uridine
  modified_base 11: mod_base = OTHER; note = guanosine
  modified_base 12: mod_base = OTHER; note = guanosine
  modified_base 13: mod_base = OTHER; note = uridine
  modified_base 14: mod_base = OTHER; note = cytidine
  modified_base 15: mod_base = OTHER; note = cytidine
  modified_base 16: mod_base = OTHER; note = cytidine
  modified_base 17: mod_base = OTHER; note = uridine
  modified_base 18: mod_base = cm
  modified_base 19: mod_base = OTHER; note = adenosine
  modified_base 20: mod_base = OTHER; note = 2'-deoxythymidine
  modified_base 21: mod_base = OTHER; note = 2'-deoxythymidine
  source 1..21: mol_type = other RNA
ctcatgtactggtccctcatt

SEQ ID NO: 1566 - RNA, 21 nt, synthetic construct
  modified_base 20..21: mod_base = OTHER; note = thymine
  modified_base 1: mod_base = OTHER; note = cytidine
  modified_base 2: mod_base = OTHER; note = cytidine
  modified_base 3: mod_base = OTHER; note = uridine
  modified_base 4: mod_base = cm
  modified_base 5: mod_base = OTHER; note = adenosine
  modified_base 6: mod_base = OTHER; note = uridine
  modified_base 7: mod_base = OTHER; note = guanosine
  modified_base 8: mod_base = um
  modified_base 9: mod_base = OTHER; note = adenosine
  modified_base 10: mod_base = OTHER; note = cytidine
  modified_base 11: mod_base = OTHER; note = uridine
  modified_base 12: mod_base = OTHER; note = guanosine
  modified_base 13: mod_base = OTHER; note = guanosine
  modified_base 14: mod_base = OTHER; note = uridine
  modified_base 15: mod_base = OTHER; note = cytidine
  modified_base 16: mod_base = OTHER; note = cytidine
  modified_base 17: mod_base = OTHER; note = cytidine
  modified_base 18: mod_base = OTHER; note = uridine
  modified_base 19: mod_base = OTHER; note = cytidine
  modified_base 20: mod_base = OTHER; note = 2'-deoxythymidine
  modified_base 21: mod_base = OTHER; note = 2'-deoxythymidine
  source 1..21: mol_type = other RNA
cctcatgtactggtccctctt

SEQ ID NO: 1567 - RNA, 21 nt, synthetic construct
  modified_base 20..21: mod_base = OTHER; note = thymine
  modified_base 1: mod_base = OTHER; note = uridine
  modified_base 2: mod_base = OTHER; note = cytidine
  modified_base 3: mod_base = OTHER; note = cytidine
  modified_base 4: mod_base = OTHER; note = uridine
  modified_base 5: mod_base = cm
  modified_base 6: mod_base = OTHER; note = adenosine
  modified_base 7: mod_base = OTHER; note = uridine
  modified_base 8: mod_base = OTHER; note = guanosine
  modified_base 9: mod_base = um
  modified_base 10: mod_base = OTHER; note = adenosine
  modified_base 11: mod_base = OTHER; note = cytidine
  modified_base 12: mod_base = OTHER; note = uridine
  modified_base 13: mod_base = OTHER; note = guanosine
  modified_base 14: mod_base = OTHER; note = guanosine
  modified_base 15: mod_base = OTHER; note = uridine
  modified_base 16: mod_base = OTHER; note = cytidine
  modified_base 17: mod_base = OTHER; note = cytidine
  modified_base 18: mod_base = OTHER; note = cytidine
  modified_base 19: mod_base = OTHER; note = uridine
  modified_base 20: mod_base = OTHER; note = 2'-deoxythymidine
  modified_base 21: mod_base = OTHER; note = 2'-deoxythymidine
  source 1..21: mol_type = other RNA
tcctcatgtactggtcccttt

SEQ ID NO: 1568 - RNA, 21 nt, synthetic construct
  modified_base 20..21: mod_base = OTHER; note = thymine
  modified_base 1: mod_base = OTHER; note = guanosine
  modified_base 2: mod_base = OTHER; note = uridine
  modified_base 3: mod_base = OTHER; note = cytidine
  modified_base 4: mod_base = OTHER; note = cytidine
  modified_base 5: mod_base = OTHER; note = uridine
  modified_base 6: mod_base = cm
  modified_base 7: mod_base = OTHER; note = adenosine
  modified_base 8: mod_base = OTHER; note = uridine
  modified_base 9: mod_base = OTHER; note = guanosine
  modified_base 10: mod_base = um
  modified_base 11: mod_base = OTHER; note = adenosine
  modified_base 12: mod_base = OTHER; note = cytidine
  modified_base 13: mod_base = OTHER; note = uridine
  modified_base 14: mod_base = OTHER; note = guanosine
  modified_base 15: mod_base = OTHER; note = guanosine
  modified_base 16: mod_base = OTHER; note = uridine
  modified_base 17: mod_base = OTHER; note = cytidine
  modified_base 18: mod_base = OTHER; note = cytidine
  modified_base 19: mod_base = OTHER; note = cytidine
  modified_base 20: mod_base = OTHER; note = 2'-deoxythymidine
  modified_base 21: mod_base = OTHER; note = 2'-deoxythymidine
  source 1..21: mol_type = other RNA
gtcctcatgtactggtccctt

SEQ ID NO: 1569 - RNA, 21 nt, synthetic construct
  modified_base 20..21: mod_base = OTHER; note = thymine
  modified_base 1: mod_base = OTHER; note = adenosine
  modified_base 2: mod_base = OTHER; note = guanosine
  modified_base 3: mod_base = OTHER; note = uridine
  modified_base 4: mod_base = OTHER; note = cytidine
  modified_base 5: mod_base = OTHER; note = cytidine
  modified_base 6: mod_base = OTHER; note = uridine
  modified_base 7: mod_base = cm
  modified_base 8: mod_base = OTHER; note = adenosine
  modified_base 9: mod_base = OTHER; note = uridine
  modified_base 10: mod_base = OTHER; note = guanosine
  modified_base 11: mod_base = um
  modified_base 12: mod_base = OTHER; note = adenosine
  modified_base 13: mod_base = OTHER; note = cytidine
  modified_base 14: mod_base = OTHER; note = uridine
  modified_base 15: mod_base = OTHER; note = guanosine
  modified_base 16: mod_base = OTHER; note = guanosine
  modified_base 17: mod_base = OTHER; note = uridine
  modified_base 18: mod_base = OTHER; note = cytidine
  modified_base 19: mod_base = OTHER; note = cytidine
  modified_base 20: mod_base = OTHER; note = 2'-deoxythymidine
  modified_base 21: mod_base = OTHER; note = 2'-deoxythymidine
  source 1..21: mol_type = other RNA
agtcctcatgtactggtcctt

SEQ ID NO: 1570 - RNA, 21 nt, synthetic construct
  modified_base 20..21: mod_base = OTHER; note = thymine
  modified_base 1: mod_base = cm
  modified_base 2: mod_base = OTHER; note = adenosine
  modified_base 3: mod_base = OTHER; note = guanosine
  modified_base 4: mod_base = OTHER; note = uridine
  modified_base 5: mod_base = OTHER; note = cytidine
  modified_base 6: mod_base = OTHER; note = cytidine
  modified_base 7: mod_base = OTHER; note = uridine
  modified_base 8: mod_base = cm
  modified_base 9: mod_base = OTHER; note = adenosine
  modified_base 10: mod_base = OTHER; note = uridine
  modified_base 11: mod_base = OTHER; note = guanosine
  modified_base 12: mod_base = um
  modified_base 13: mod_base = OTHER; note = adenosine
  modified_base 14: mod_base = OTHER; note = cytidine
  modified_base 15: mod_base = OTHER; note = uridine
  modified_base 16: mod_base = OTHER; note = guanosine
  modified_base 17: mod_base = OTHER; note = guanosine
  modified_base 18: mod_base = OTHER; note = uridine
  modified_base 19: mod_base = OTHER; note = cytidine
  modified_base 20: mod_base = OTHER; note = 2'-deoxythymidine
  modified_base 21: mod_base = OTHER; note = 2'-deoxythymidine
  source 1..21: mol_type = other RNA
cagtcctcatgtactggtctt

SEQ ID NO: 1571 - RNA, 21 nt, synthetic construct
  modified_base 20..21: mod_base = OTHER; note = thymine
  modified_base 1: mod_base = OTHER; note = cytidine
  modified_base 2: mod_base = cm
  modified_base 3: mod_base = OTHER; note = adenosine
  modified_base 4: mod_base = OTHER; note = guanosine
  modified_base 5: mod_base = OTHER; note = uridine
  modified_base 6: mod_base = OTHER; note = cytidine
  modified_base 7: mod_base = OTHER; note = cytidine
  modified_base 8: mod_base = OTHER; note = uridine
  modified_base 9: mod_base = cm
  modified_base 10: mod_base = OTHER; note = adenosine
  modified_base 11: mod_base = OTHER; note = uridine
  modified_base 12: mod_base = OTHER; note = guanosine
  modified_base 13: mod_base = um
  modified_base 14: mod_base = OTHER; note = adenosine
  modified_base 15: mod_base = OTHER; note = cytidine
  modified_base 16: mod_base = OTHER; note = uridine
  modified_base 17: mod_base = OTHER; note = guanosine
  modified_base 18: mod_base = OTHER; note = guanosine
  modified_base 19: mod_base = OTHER; note = uridine
  modified_base 20: mod_base = OTHER; note = 2'-deoxythymidine
  modified_base 21: mod_base = OTHER; note = 2'-deoxythymidine
  source 1..21: mol_type = other RNA
ccagtcctcatgtactggttt

SEQ ID NO: 1572 - RNA, 21 nt, synthetic construct
  modified_base 20..21: mod_base = OTHER; note = thymine
  modified_base 1: mod_base = OTHER; note = cytidine
  modified_base 2: mod_base = OTHER; note = cytidine
  modified_base 3: mod_base = cm
  modified_base 4: mod_base = OTHER; note = adenosine
  modified_base 5: mod_base = OTHER; note = guanosine
  modified_base 6: mod_base = OTHER; note = uridine
  modified_base 7: mod_base = OTHER; note = cytidine
  modified_base 8: mod_base = OTHER; note = cytidine
  modified_base 9: mod_base = OTHER; note = uridine
  modified_base 10: mod_base = cm
  modified_base 11: mod_base = OTHER; note = adenosine
  modified_base 12: mod_base = OTHER; note = uridine
  modified_base 13: mod_base = OTHER; note = guanosine
  modified_base 14: mod_base = um
  modified_base 15: mod_base = OTHER; note = adenosine
  modified_base 16: mod_base = OTHER; note = cytidine
  modified_base 17: mod_base = OTHER; note = uridine
  modified_base 18: mod_base = OTHER; note = guanosine
  modified_base 19: mod_base = OTHER; note = guanosine
  modified_base 20: mod_base = OTHER; note = 2'-deoxythymidine
  modified_base 21: mod_base = OTHER; note = 2'-deoxythymidine
  source 1..21: mol_type = other RNA
cccagtcctcatgtactggtt

SEQ ID NO: 1573 - RNA, 21 nt, synthetic construct
  modified_base 20..21: mod_base = OTHER; note = thymine
  modified_base 1: mod_base = OTHER; note = cytidine
  modified_base 2: mod_base = OTHER; note = cytidine
  modified_base 3: mod_base = OTHER; note = cytidine
  modified_base 4: mod_base = cm
  modified_base 5: mod_base = OTHER; note = adenosine
  modified_base 6: mod_base = OTHER; note = guanosine
  modified_base 7: mod_base = OTHER; note = uridine
  modified_base 8: mod_base = OTHER; note = cytidine
  modified_base 9: mod_base = OTHER; note = cytidine
  modified_base 10: mod_base = OTHER; note = uridine
  modified_base 11: mod_base = cm
  modified_base 12: mod_base = OTHER; note = adenosine
  modified_base 13: mod_base = OTHER; note = uridine
  modified_base 14: mod_base = OTHER; note = guanosine
  modified_base 15: mod_base = um
  modified_base 16: mod_base = OTHER; note = adenosine
  modified_base 17: mod_base = OTHER; note = cytidine
  modified_base 18: mod_base = OTHER; note = uridine
  modified_base 19: mod_base = OTHER; note = guanosine
  modified_base 20: mod_base = OTHER; note = 2'-deoxythymidine
  modified_base 21: mod_base = OTHER; note = 2'-deoxythymidine
  source 1..21: mol_type = other RNA
ccccagtcctcatgtactgtt

SEQ ID NO: 1574 - RNA, 21 nt, synthetic construct
  modified_base 20..21: mod_base = OTHER; note = thymine
  modified_base 1: mod_base = OTHER; note = uridine
  modified_base 2: mod_base = OTHER; note = cytidine
  modified_base 3: mod_base = OTHER; note = cytidine
  modified_base 4: mod_base = OTHER; note = cytidine
  modified_base 5: mod_base = cm
  modified_base 6: mod_base = OTHER; note = adenosine
  modified_base 7: mod_base = OTHER; note = guanosine
  modified_base 8: mod_base = OTHER; note = uridine
  modified_base 9: mod_base = OTHER; note = cytidine
  modified_base 10: mod_base = OTHER; note = cytidine
  modified_base 11: mod_base = OTHER; note = uridine
  modified_base 12: mod_base = cm
  modified_base 13: mod_base = OTHER; note = adenosine
  modified_base 14: mod_base = OTHER; note = uridine
  modified_base 15: mod_base = OTHER; note = guanosine
  modified_base 16: mod_base = um
  modified_base 17: mod_base = OTHER; note = adenosine
  modified_base 18: mod_base = OTHER; note = cytidine
  modified_base 19: mod_base = OTHER; note = uridine
  modified_base 20: mod_base = OTHER; note = 2'-deoxythymidine
  modified_base 21: mod_base = OTHER; note = 2'-deoxythymidine
  source 1..21: mol_type = other RNA
tccccagtcctcatgtacttt

SEQ ID NO: 1575 - RNA, 21 nt, synthetic construct
  modified_base 20..21: mod_base = OTHER; note = thymine
  modified_base 1: mod_base = OTHER; note = cytidine
  modified_base 2: mod_base = OTHER; note = uridine
  modified_base 3: mod_base = OTHER; note = cytidine
  modified_base 4: mod_base = OTHER; note = cytidine
  modified_base 5: mod_base = OTHER; note = cytidine
  modified_base 6: mod_base = cm
  modified_base 7: mod_base = OTHER; note = adenosine
  modified_base 8: mod_base = OTHER; note = guanosine
  modified_base 9: mod_base = OTHER; note = uridine
  modified_base 10: mod_base = OTHER; note = cytidine
  modified_base 11: mod_base = OTHER; note = cytidine
  modified_base 12: mod_base = OTHER; note = uridine
  modified_base 13: mod_base = cm
  modified_base 14: mod_base = OTHER; note = adenosine
  modified_base 15: mod_base = OTHER; note = uridine
  modified_base 16: mod_base = OTHER; note = guanosine
  modified_base 17: mod_base = um
  modified_base 18: mod_base = OTHER; note = adenosine
  modified_base 19: mod_base = OTHER; note = cytidine
  modified_base 20: mod_base = OTHER; note = 2'-deoxythymidine
  modified_base 21: mod_base = OTHER; note = 2'-deoxythymidine
  source 1..21: mol_type = other RNA
ctccccagtcctcatgtactt

SEQ ID NO: 1576 - RNA, 21 nt, synthetic construct
  modified_base 20..21: mod_base = OTHER; note = thymine
  modified_base 1: mod_base = OTHER; note = cytidine
  modified_base 2: mod_base = OTHER; note = cytidine
  modified_base 3: mod_base = OTHER; note = uridine
  modified_base 4: mod_base = OTHER; note = cytidine
  modified_base 5: mod_base = OTHER; note = cytidine
  modified_base 6: mod_base = OTHER; note = cytidine
  modified_base 7: mod_base = cm
  modified_base 8: mod_base = OTHER; note = adenosine
  modified_base 9: mod_base = OTHER; note = guanosine
  modified_base 10: mod_base = OTHER; note = uridine
  modified_base 11: mod_base = OTHER; note = cytidine
  modified_base 12: mod_base = OTHER; note = cytidine
  modified_base 13: mod_base = OTHER; note = uridine
  modified_base 14: mod_base = cm
  modified_base 15: mod_base = OTHER; note = adenosine
  modified_base 16: mod_base = OTHER; note = uridine
  modified_base 17: mod_base = OTHER; note = guanosine
  modified_base 18: mod_base = um
  modified_base 19: mod_base = OTHER; note = adenosine
  modified_base 20: mod_base = OTHER; note = 2'-deoxythymidine
  modified_base 21: mod_base = OTHER; note = 2'-deoxythymidine
  source 1..21: mol_type = other RNA
cctccccagtcctcatgtatt

SEQ ID NO: 1577 - DNA, 21 bp, synthetic construct
  modified_base 1: mod_base = OTHER; note = cytidine
  modified_base 2: mod_base = OTHER; note = cytidine
  modified_base 3: mod_base = OTHER; note = cytidine
  modified_base 4: mod_base = OTHER; note = uridine
  modified_base 5: mod_base = OTHER; note = cytidine
  modified_base 6: mod_base = OTHER; note = cytidine
  modified_base 7: mod_base = OTHER; note = cytidine
  modified_base 8: mod_base = cm
  modified_base 9: mod_base = OTHER; note = adenosine
  modified_base 10: mod_base = OTHER; note = guanosine
  modified_base 11: mod_base = OTHER; note = uridine
  modified_base 12: mod_base = OTHER; note = cytidine
  modified_base 13: mod_base = OTHER; note = cytidine
  modified_base 14: mod_base = OTHER; note = uridine
  modified_base 15: mod_base = cm
  modified_base 16: mod_base = OTHER; note = adenosine
  modified_base 17: mod_base = OTHER; note = uridine
  modified_base 18: mod_base = OTHER; note = guanosine
  modified_base 19: mod_base = OTHER; note = uridine
  modified_base 20: mod_base = OTHER; note = 2'-deoxythymidine
  modified_base 21: mod_base = OTHER; note = 2'-deoxythymidine
  source 1..21: mol_type = other DNA
ccctccccagtcctcatgttt

SEQ ID NO: 1578 - DNA, 21 bp, synthetic construct
  modified_base 1: mod_base = OTHER; note = guanosine
  modified_base 2: mod_base = OTHER; note = cytidine
  modified_base 3: mod_base = OTHER; note = cytidine
  modified_base 4: mod_base = OTHER; note = cytidine
  modified_base 5: mod_base = OTHER; note = uridine
  modified_base 6: mod_base = OTHER; note = cytidine
  modified_base 7: mod_base = OTHER; note = cytidine
  modified_base 8: mod_base = OTHER; note = cytidine
  modified_base 9: mod_base = cm
  modified_base 10: mod_base = OTHER; note = adenosine
  modified_base 11: mod_base = OTHER; note = guanosine
  modified_base 12: mod_base = OTHER; note = uridine
  modified_base 13: mod_base = OTHER; note = cytidine
  modified_base 14: mod_base = OTHER; note = cytidine
  modified_base 15: mod_base = OTHER; note = uridine
  modified_base 16: mod_base = cm
  modified_base 17: mod_base = OTHER; note = adenosine
  modified_base 18: mod_base = OTHER; note = uridine
  modified_base 19: mod_base = OTHER; note = guanosine
  modified_base 20: mod_base = OTHER; note = 2'-deoxythymidine
  modified_base 21: mod_base = OTHER; note = 2'-deoxythymidine
  source 1..21: mol_type = other DNA
gccctccccagtcctcatgtt

SEQ ID NO: 1579 - DNA, 21 bp, synthetic construct
  modified_base 1: mod_base = OTHER; note = adenosine
  modified_base 2: mod_base = OTHER; note = guanosine
  modified_base 3: mod_base = OTHER; note = cytidine
  modified_base 4: mod_base = OTHER; note = cytidine
  modified_base 5: mod_base = OTHER; note = cytidine
  modified_base 6: mod_base = OTHER; note = uridine
  modified_base 7: mod_base = OTHER; note = cytidine
  modified_base 8: mod_base = OTHER; note = cytidine
  modified_base 9: mod_base = OTHER; note = cytidine
  modified_base 10: mod_base = cm
  modified_base 11: mod_base = OTHER; note = adenosine
  modified_base 12: mod_base = OTHER; note = guanosine
  modified_base 13: mod_base = OTHER; note = uridine
  modified_base 14: mod_base = OTHER; note = cytidine
  modified_base 15: mod_base = OTHER; note = cytidine
  modified_base 16: mod_base = OTHER; note = uridine
  modified_base 17: mod_base = cm
  modified_base 18: mod_base = OTHER; note = adenosine
  modified_base 19: mod_base = OTHER; note = uridine
  modified_base 20: mod_base = OTHER; note = 2'-deoxythymidine
  modified_base 21: mod_base = OTHER; note = 2'-deoxythymidine
  source 1..21: mol_type = other DNA
agccctccccagtcctcattt

SEQ ID NO: 1580 - DNA, 21 bp, synthetic construct
  modified_base 1: mod_base = OTHER; note = adenosine
  modified_base 2: mod_base = OTHER; note = adenosine
  modified_base 3: mod_base = OTHER; note = guanosine
  modified_base 4: mod_base = OTHER; note = cytidine
  modified_base 5: mod_base = OTHER; note = cytidine
  modified_base 6: mod_base = OTHER; note = cytidine
  modified_base 7: mod_base = OTHER; note = uridine
  modified_base 8: mod_base = OTHER; note = cytidine
  modified_base 9: mod_base = OTHER; note = cytidine
  modified_base 10: mod_base = OTHER; note = cytidine
  modified_base 11: mod_base = cm
  modified_base 12: mod_base = OTHER; note = adenosine
  modified_base 13: mod_base = OTHER; note = guanosine
  modified_base 14: mod_base = OTHER; note = uridine
  modified_base 15: mod_base = OTHER; note = cytidine
  modified_base 16: mod_base = OTHER; note = cytidine
  modified_base 17: mod_base = OTHER; note = uridine
  modified_base 18: mod_base = cm
  modified_base 19: mod_base = OTHER; note = adenosine
  modified_base 20: mod_base = OTHER; note = 2'-deoxythymidine
  modified_base 21: mod_base = OTHER; note = 2'-deoxythymidine
  source 1..21: mol_type = other DNA
aagccctccccagtcctcatt

SEQ ID NO: 1581 - DNA, 21 bp, synthetic construct
  modified_base 1: mod_base = OTHER; note = adenosine
  modified_base 2: mod_base = OTHER; note = adenosine
  modified_base 3: mod_base = OTHER; note = adenosine
  modified_base 4: mod_base = OTHER; note = guanosine
  modified_base 5: mod_base = OTHER; note = cytidine
  modified_base 6: mod_base = OTHER; note = cytidine
  modified_base 7: mod_base = OTHER; note = cytidine
  modified_base 8: mod_base = OTHER; note = uridine
  modified_base 9: mod_base = OTHER; note = cytidine
  modified_base 10: mod_base = OTHER; note = cytidine
  modified_base 11: mod_base = OTHER; note = cytidine
  modified_base 12: mod_base = cm
  modified_base 13: mod_base = OTHER; note = adenosine
  modified_base 14: mod_base = OTHER; note = guanosine
  modified_base 15: mod_base = OTHER; note = uridine
  modified_base 16: mod_base = OTHER; note = cytidine
  modified_base 17: mod_base = OTHER; note = cytidine
  modified_base 18: mod_base = OTHER; note = uridine
  modified_base 19: mod_base = OTHER; note = cytidine
  modified_base 20: mod_base = OTHER; note = 2'-deoxythymidine
  modified_base 21: mod_base = OTHER; note = 2'-deoxythymidine
  source 1..21: mol_type = other DNA
aaagccctccccagtcctctt

SEQ ID NO: 1582 - DNA, 21 bp, synthetic construct
  modified_base 1: mod_base = OTHER; note = guanosine
  modified_base 2: mod_base = OTHER; note = adenosine
  modified_base 3: mod_base = OTHER; note = adenosine
  modified_base 4: mod_base = OTHER; note = adenosine
  modified_base 5: mod_base = OTHER; note = guanosine
  modified_base 6: mod_base = OTHER; note = cytidine
  modified_base 7: mod_base = OTHER; note = cytidine
  modified_base 8: mod_base = OTHER; note = cytidine
  modified_base 9: mod_base = OTHER; note = uridine
  modified_base 10: mod_base = OTHER; note = cytidine
  modified_base 11: mod_base = OTHER; note = cytidine
  modified_base 12: mod_base = OTHER; note = cytidine
  modified_base 13: mod_base = cm
  modified_base 14: mod_base = OTHER; note = adenosine
  modified_base 15: mod_base = OTHER; note = guanosine
  modified_base 16: mod_base = OTHER; note = uridine
  modified_base 17: mod_base = OTHER; note = cytidine
  modified_base 18: mod_base = OTHER; note = cytidine
  modified_base 19: mod_base = OTHER; note = uridine
  modified_base 20: mod_base = OTHER; note = 2'-deoxythymidine
  modified_base 21: mod_base = OTHER; note = 2'-deoxythymidine
  source 1..21: mol_type = other DNA
gaaagccctccccagtccttt

SEQ ID NO: 1583 - DNA, 21 bp, synthetic construct
  modified_base 1: mod_base = OTHER; note = adenosine
  modified_base 2: mod_base = OTHER; note = guanosine
  modified_base 3: mod_base = OTHER; note = adenosine
  modified_base 4: mod_base = OTHER; note = adenosine
  modified_base 5: mod_base = OTHER; note = adenosine
  modified_base 6: mod_base = OTHER; note = guanosine
  modified_base 7: mod_base = OTHER; note = cytidine
  modified_base 8: mod_base = OTHER; note = cytidine
  modified_base 9: mod_base = OTHER; note = cytidine
  modified_base 10: mod_base = OTHER; note = uridine
  modified_base 11: mod_base = OTHER; note = cytidine
  modified_base 12: mod_base = OTHER; note = cytidine
  modified_base 13: mod_base = OTHER; note = cytidine
  modified_base 14: mod_base = cm
  modified_base 15: mod_base = OTHER; note = adenosine
  modified_base 16: mod_base = OTHER; note = guanosine
  modified_base 17: mod_base = OTHER; note = uridine
  modified_base 18: mod_base = OTHER; note = cytidine
  modified_base 19: mod_base = OTHER; note = cytidine
  modified_base 20: mod_base = OTHER; note = 2'-deoxythymidine
  modified_base 21: mod_base = OTHER; note = 2'-deoxythymidine
  source 1..21: mol_type = other DNA
agaaagccctccccagtcctt

SEQ ID NO: 1584 - DNA, 21 bp, synthetic construct
  modified_base 1: mod_base = OTHER; note = adenosine
  modified_base 2: mod_base = OTHER; note = adenosine
  modified_base 3: mod_base = OTHER; note = guanosine
  modified_base 4: mod_base = OTHER; note = adenosine
  modified_base 5: mod_base = OTHER; note = adenosine
  modified_base 6: mod_base = OTHER; note = adenosine
  modified_base 7: mod_base = OTHER; note = guanosine
  modified_base 8: mod_base = OTHER; note = cytidine
  modified_base 9: mod_base = OTHER; note = cytidine
  modified_base 10: mod_base = OTHER; note = cytidine
  modified_base 11: mod_base = OTHER; note = uridine
  modified_base 12: mod_base = OTHER; note = cytidine
  modified_base 13: mod_base = OTHER; note = cytidine
  modified_base 14: mod_base = OTHER; note = cytidine
  modified_base 15: mod_base = cm
  modified_base 16: mod_base = OTHER; note = adenosine
  modified_base 17: mod_base = OTHER; note = guanosine
  modified_base 18: mod_base = OTHER; note = uridine
  modified_base 19: mod_base = OTHER; note = cytidine
  modified_base 20: mod_base = OTHER; note = 2'-deoxythymidine
  modified_base 21: mod_base = OTHER; note = 2'-deoxythymidine
  source 1..21: mol_type = other DNA
aagaaagccctccccagtctt

SEQ ID NO: 1585 - DNA, 21 bp, synthetic construct
  modified_base 1: mod_base = OTHER; note = adenosine
  modified_base 2: mod_base = OTHER; note = adenosine
  modified_base 3: mod_base = OTHER; note = adenosine
  modified_base 4: mod_base = OTHER; note = guanosine
  modified_base 5: mod_base = OTHER; note = adenosine
  modified_base 6: mod_base = OTHER; note = adenosine
  modified_base 7: mod_base = OTHER; note = adenosine
  modified_base 8: mod_base = OTHER; note = guanosine
  modified_base 9: mod_base = OTHER; note = cytidine
  modified_base 10: mod_base = OTHER; note = cytidine
  modified_base 11: mod_base = OTHER; note = cytidine
  modified_base 12: mod_base = OTHER; note = uridine
  modified_base 13: mod_base = OTHER; note = cytidine
  modified_base 14: mod_base = OTHER; note = cytidine
  modified_base 15: mod_base = OTHER; note = cytidine
  modified_base 16: mod_base = cm
  modified_base 17: mod_base = OTHER; note = adenosine
  modified_base 18: mod_base = OTHER; note = guanosine
  modified_base 19: mod_base = OTHER; note = uridine
  modified_base 20: mod_base = OTHER; note = 2'-deoxythymidine
  modified_base 21: mod_base = OTHER; note = 2'-deoxythymidine
  source 1..21: mol_type = other DNA
aaagaaagccctccccagttt

SEQ ID NO: 1586 - DNA, 21 bp, synthetic construct
  modified_base 1: mod_base = cm
  modified_base 2: mod_base = OTHER; note = adenosine
  modified_base 3: mod_base = OTHER; note = adenosine
  modified_base 4: mod_base = OTHER; note = adenosine
  modified_base 5: mod_base = OTHER; note = guanosine
  modified_base 6: mod_base = OTHER; note = adenosine
  modified_base 7: mod_base = OTHER; note = adenosine
  modified_base 8: mod_base = OTHER; note = adenosine
  modified_base 9: mod_base = OTHER; note = guanosine
  modified_base 10: mod_base = OTHER; note = cytidine
  modified_base 11: mod_base = OTHER; note = cytidine
  modified_base 12: mod_base = OTHER; note = cytidine
  modified_base 13: mod_base = OTHER; note = uridine
  modified_base 14: mod_base = OTHER; note = cytidine
  modified_base 15: mod_base = OTHER; note = cytidine
  modified_base 16: mod_base = OTHER; note = cytidine
  modified_base 17: mod_base = cm
  modified_base 18: mod_base = OTHER; note = adenosine
  modified_base 19: mod_base = OTHER; note = guanosine
  modified_base 20: mod_base = OTHER; note = 2'-deoxythymidine
  modified_base 21: mod_base = OTHER; note = 2'-deoxythymidine
  source 1..21: mol_type = other DNA
caaagaaagccctccccagtt

SEQ ID NO: 1587 - DNA, 21 bp, synthetic construct
  modified_base 1: mod_base = OTHER; note = adenosine
  modified_base 2: mod_base = cm
  modified_base 3: mod_base = OTHER; note = adenosine
  modified_base 4: mod_base = OTHER; note = adenosine
  modified_base 5: mod_base = OTHER; note = adenosine
  modified_base 6: mod_base = OTHER; note = guanosine
  modified_base 7: mod_base = OTHER; note = adenosine
  modified_base 8: mod_base = OTHER; note = adenosine
  modified_base 9: mod_base = OTHER; note = adenosine
  modified_base 10: mod_base = OTHER; note = guanosine
  modified_base 11: mod_base = OTHER; note = cytidine
  modified_base 12: mod_base = OTHER; note = cytidine
  modified_base 13: mod_base = OTHER; note = cytidine
  modified_base 14: mod_base = OTHER; note = uridine
  modified_base 15: mod_base = OTHER; note = cytidine
  modified_base 16: mod_base = OTHER; note = cytidine
  modified_base 17: mod_base = OTHER; note = cytidine
  modified_base 18: mod_base = cm
  modified_base 19: mod_base = OTHER; note = adenosine
  modified_base 20: mod_base = OTHER; note = 2'-deoxythymidine
  modified_base 21: mod_base = OTHER; note = 2'-deoxythymidine
  source 1..21: mol_type = other DNA
acaaagaaagccctccccatt

SEQ ID NO: 1588 - RNA, 21 nt, synthetic construct
  modified_base 20..21: mod_base = OTHER; note = thymine
  modified_base 1: mod_base = OTHER; note = uridine
  modified_base 2: mod_base = um
  modified_base 3: mod_base = OTHER; note = adenosine
  modified_base 4: mod_base = OTHER; note = guanosine
  modified_base 5: mod_base = um
  modified_base 6: mod_base = OTHER; note = adenosine
  modified_base 7: mod_base = OTHER; note = uridine
  modified_base 8: mod_base = um
  modified_base 9: mod_base = OTHER; note = adenosine
  modified_base 10: mod_base = OTHER; note = uridine
  modified_base 11: mod_base = OTHER; note = uridine
  modified_base 12: mod_base = um
  modified_base 13: mod_base = OTHER; note = adenosine
  modified_base 14: mod_base = OTHER; note = uridine
  modified_base 15: mod_base = OTHER; note = guanosine
  modified_base 16: mod_base = OTHER; note = guanosine
  modified_base 17: mod_base = cm
  modified_base 18: mod_base = OTHER; note = adenosine
  modified_base 19: mod_base = OTHER; note = adenosine
  modified_base 20: mod_base = OTHER; note = 2'-deoxythymidine
  modified_base 21: mod_base = OTHER; note = 2'-deoxythymidine
  source 1..21: mol_type = other RNA
ttagtattatttatggcaatt

SEQ ID NO: 1589 - RNA, 21 nt, synthetic construct
  modified_base 20..21: mod_base = OTHER; note = thymine
  modified_base 1: mod_base = OTHER; note = uridine
  modified_base 2: mod_base = OTHER; note = uridine
  modified_base 3: mod_base = um
  modified_base 4: mod_base = OTHER; note = adenosine
  modified_base 5: mod_base = OTHER; note = guanosine
  modified_base 6: mod_base = um
  modified_base 7: mod_base = OTHER; note = adenosine
  modified_base 8: mod_base = OTHER; note = uridine
  modified_base 9: mod_base = um
  modified_base 10: mod_base = OTHER; note = adenosine
  modified_base 11: mod_base = OTHER; note = uridine
  modified_base 12: mod_base = OTHER; note = uridine
  modified_base 13: mod_base = um
  modified_base 14: mod_base = OTHER; note = adenosine
  modified_base 15: mod_base = OTHER; note = uridine
  modified_base 16: mod_base = OTHER; note = guanosine
  modified_base 17: mod_base = OTHER; note = guanosine
  modified_base 18: mod_base = cm
  modified_base 19: mod_base = OTHER; note = adenosine
  modified_base 20: mod_base = OTHER; note = 2'-deoxythymidine
  modified_base 21: mod_base = OTHER; note = 2'-deoxythymidine
  source 1..21: mol_type = other RNA
tttagtattatttatggcatt

SEQ ID NO: 1590 - RNA, 21 nt, synthetic construct
  modified_base 20..21: mod_base = OTHER; note = thymine
  modified_base 1: mod_base = OTHER; note = adenosine
  modified_base 2: mod_base = OTHER; note = uridine
  modified_base 3: mod_base = OTHER; note = uridine
  modified_base 4: mod_base = um
  modified_base 5: mod_base = OTHER; note = adenosine
  modified_base 6: mod_base = OTHER; note = guanosine
  modified_base 7: mod_base = um
  modified_base 8: mod_base = OTHER; note = adenosine
  modified_base 9: mod_base = OTHER; note = uridine
  modified_base 10: mod_base = um
  modified_base 11: mod_base = OTHER; note = adenosine
  modified_base 12: mod_base = OTHER; note = uridine
  modified_base 13: mod_base = OTHER; note = uridine
  modified_base 14: mod_base = um
  modified_base 15: mod_base = OTHER; note = adenosine
  modified_base 16: mod_base = OTHER; note = uridine
  modified_base 17: mod_base = OTHER; note = guanosine
  modified_base 18: mod_base = OTHER; note = guanosine
  modified_base 19: mod_base = OTHER; note = cytidine
  modified_base 20: mod_base = OTHER; note = 2'-deoxythymidine
  modified_base 21: mod_base = OTHER; note = 2'-deoxythymidine
  source 1..21: mol_type = other RNA
atttagtattatttatggctt

SEQ ID NO: 1591 - RNA, 21 nt, synthetic construct
  modified_base 20..21: mod_base = OTHER; note = thymine
  modified_base 1: mod_base = OTHER; note = guanosine
  modified_base 2: mod_base = OTHER; note = adenosine
  modified_base 3: mod_base = OTHER; note = uridine
  modified_base 4: mod_base = OTHER; note = uridine
  modified_base 5: mod_base = um
  modified_base 6: mod_base = OTHER; note = adenosine
  modified_base 7: mod_base = OTHER; note = guanosine
  modified_base 8: mod_base = um
  modified_base 9: mod_base = OTHER; note = adenosine
  modified_base 10: mod_base = OTHER; note = uridine
  modified_base 11: mod_base = um
  modified_base 12: mod_base = OTHER; note = adenosine
  modified_base 13: mod_base = OTHER; note = uridine
  modified_base 14: mod_base = OTHER; note = uridine
  modified_base 15: mod_base = um
  modified_base 16: mod_base = OTHER; note = adenosine
  modified_base 17: mod_base = OTHER; note = uridine
  modified_base 18: mod_base = OTHER; note = guanosine
  modified_base 19: mod_base = OTHER; note = guanosine
  modified_base 20: mod_base = OTHER; note = 2'-deoxythymidine
  modified_base 21: mod_base = OTHER; note = 2'-deoxythymidine
  source 1..21: mol_type = other RNA
gatttagtattatttatggtt

SEQ ID NO: 1592 - RNA, 21 nt, synthetic construct
  modified_base 20..21: mod_base = OTHER; note = thymine
  modified_base 1: mod_base = OTHER; note = uridine
  modified_base 2: mod_base = OTHER; note = guanosine
  modified_base 3: mod_base = OTHER; note = adenosine
  modified_base 4: mod_base = OTHER; note = uridine
  modified_base 5: mod_base = OTHER; note = uridine
  modified_base 6: mod_base = um
  modified_base 7: mod_base = OTHER; note = adenosine
  modified_base 8: mod_base = OTHER; note = guanosine
  modified_base 9: mod_base = um
  modified_base 10: mod_base = OTHER; note = adenosine
  modified_base 11: mod_base = OTHER; note = uridine
  modified_base 12: mod_base = um
  modified_base 13: mod_base = OTHER; note = adenosine
  modified_base 14: mod_base = OTHER; note = uridine
  modified_base 15: mod_base = OTHER; note = uridine
  modified_base 16: mod_base = um
  modified_base 17: mod_base = OTHER; note = adenosine
  modified_base 18: mod_base = OTHER; note = uridine
  modified_base 19: mod_base = OTHER; note = guanosine
  modified_base 20: mod_base = OTHER; note = 2'-deoxythymidine
  modified_base 21: mod_base = OTHER; note = 2'-deoxythymidine
  source 1..21: mol_type = other RNA
tgatttagtattatttatgtt

SEQ ID NO: 1593 - RNA, 21 nt, synthetic construct
  modified_base 20..21: mod_base = OTHER; note = thymine
  modified_base 1: mod_base = OTHER; note = adenosine
  modified_base 2: mod_base = OTHER; note = uridine
  modified_base 3: mod_base = OTHER; note = guanosine
  modified_base 4: mod_base = OTHER; note = adenosine
  modified_base 5: mod_base = OTHER; note = uridine
  modified_base 6: mod_base = OTHER; note = uridine
  modified_base 7: mod_base = um
  modified_base 8: mod_base = OTHER; note = adenosine
  modified_base 9: mod_base = OTHER; note = guanosine
  modified_base 10: mod_base = um
  modified_base 11: mod_base = OTHER; note = adenosine
  modified_base 12: mod_base = OTHER; note = uridine
  modified_base 13: mod_base = um
  modified_base 14: mod_base = OTHER; note = adenosine
  modified_base 15: mod_base = OTHER; note = uridine
  modified_base 16: mod_base = OTHER; note = uridine
  modified_base 17: mod_base = um
  modified_base 18: mod_base = OTHER; note = adenosine
  modified_base 19: mod_base = OTHER; note = uridine
  modified_base 20: mod_base = OTHER; note = 2'-deoxythymidine
  modified_base 21: mod_base = OTHER; note = 2'-deoxythymidine
  source 1..21: mol_type = other RNA
atgatttagtattatttattt

SEQ ID NO: 1594 - RNA, 21 nt, synthetic construct
  modified_base 20..21: mod_base = OTHER; note = thymine
  modified_base 1: mod_base = OTHER; note = adenosine
  modified_base 2: mod_base = OTHER; note = adenosine
  modified_base 3: mod_base = OTHER; note = uridine
  modified_base 4: mod_base = OTHER; note = guanosine
  modified_base 5: mod_base = OTHER; note = adenosine
  modified_base 6: mod_base = OTHER; note = uridine
  modified_base 7: mod_base = OTHER; note = uridine
  modified_base 8: mod_base = um
  modified_base 9: mod_base = OTHER; note = adenosine
  modified_base 10: mod_base = OTHER; note = guanosine
  modified_base 11: mod_base = um
  modified_base 12: mod_base = OTHER; note = adenosine
  modified_base 13: mod_base = OTHER; note = uridine
  modified_base 14: mod_base = um
  modified_base 15: mod_base = OTHER; note = adenosine
  modified_base 16: mod_base = OTHER; note = uridine
  modified_base 17: mod_base = OTHER; note = uridine
  modified_base 18: mod_base = um
  modified_base 19: mod_base = OTHER; note = adenosine
  modified_base 20: mod_base = OTHER; note = 2'-deoxythymidine
  modified_base 21: mod_base = OTHER; note = 2'-deoxythymidine
  source 1..21: mol_type = other RNA
aatgatttagtattatttatt

SEQ ID NO: 1595 - RNA, 21 nt, synthetic construct
  modified_base 20..21: mod_base = OTHER; note = thymine
  modified_base 1: mod_base = OTHER; note = adenosine
  modified_base 2: mod_base = OTHER; note = adenosine
  modified_base 3: mod_base = OTHER; note = adenosine
  modified_base 4: mod_base = OTHER; note = uridine
  modified_base 5: mod_base = OTHER; note = guanosine
  modified_base 6: mod_base = OTHER; note = adenosine
  modified_base 7: mod_base = OTHER; note = uridine
  modified_base 8: mod_base = OTHER; note = uridine
  modified_base 9: mod_base = um
  modified_base 10: mod_base = OTHER; note = adenosine
  modified_base 11: mod_base = OTHER; note = guanosine
  modified_base 12: mod_base = um
  modified_base 13: mod_base = OTHER; note = adenosine
  modified_base 14: mod_base = OTHER; note = uridine
  modified_base 15: mod_base = um
  modified_base 16: mod_base = OTHER; note = adenosine
  modified_base 17: mod_base = OTHER; note = uridine
  modified_base 18: mod_base = OTHER; note = uridine
  modified_base 19: mod_base = OTHER; note = uridine
  modified_base 20: mod_base = OTHER; note = 2'-deoxythymidine
  modified_base 21: mod_base = OTHER; note = 2'-deoxythymidine
  source 1..21: mol_type = other RNA
aaatgatttagtattattttt

SEQ ID NO: 1596 - RNA, 21 nt, synthetic construct
  modified_base 20..21: mod_base = OTHER; note = thymine
  modified_base 1: mod_base = cm
  modified_base 2: mod_base = OTHER; note = adenosine
  modified_base 3: mod_base = OTHER; note = adenosine
  modified_base 4: mod_base = OTHER; note = adenosine
  modified_base 5: mod_base = OTHER; note = uridine
  modified_base 6: mod_base = OTHER; note = guanosine
  modified_base 7: mod_base = OTHER; note = adenosine
  modified_base 8: mod_base = OTHER; note = uridine
  modified_base 9: mod_base = OTHER; note = uridine
  modified_base 10: mod_base = um
  modified_base 11: mod_base = OTHER; note = adenosine
  modified_base 12: mod_base = OTHER; note = guanosine
  modified_base 13: mod_base = um
  modified_base 14: mod_base = OTHER; note = adenosine
  modified_base 15: mod_base = OTHER; note = uridine
  modified_base 16: mod_base = um
  modified_base 17: mod_base = OTHER; note = adenosine
  modified_base 18: mod_base = OTHER; note = uridine
  modified_base 19: mod_base = OTHER; note = uridine
  modified_base 20: mod_base = OTHER; note = 2'-deoxythymidine
  modified_base 21: mod_base = OTHER; note = 2'-deoxythymidine
  source 1..21: mol_type = other RNA
caaatgatttagtattatttt

SEQ ID NO: 1597 - RNA, 21 nt, synthetic construct
  modified_base 20..21: mod_base = OTHER; note = thymine
  modified_base 1: mod_base = OTHER; note = uridine
  modified_base 2: mod_base = cm
  modified_base 3: mod_base = OTHER; note = adenosine
  modified_base 4: mod_base = OTHER; note = adenosine
  modified_base 5: mod_base = OTHER; note = adenosine
  modified_base 6: mod_base = OTHER; note = uridine
  modified_base 7: mod_base = OTHER; note = guanosine
  modified_base 8: mod_base = OTHER; note = adenosine
  modified_base 9: mod_base = OTHER; note = uridine
  modified_base 10: mod_base = OTHER; note = uridine
  modified_base 11: mod_base = um
  modified_base 12: mod_base = OTHER; note = adenosine
  modified_base 13: mod_base = OTHER; note = guanosine
  modified_base 14: mod_base = um
  modified_base 15: mod_base = OTHER; note = adenosine
  modified_base 16: mod_base = OTHER; note = uridine
  modified_base 17: mod_base = um
  modified_base 18: mod_base = OTHER; note = adenosine
  modified_base 19: mod_base = OTHER; note = uridine
  modified_base 20: mod_base = OTHER; note = 2'-deoxythymidine
  modified_base 21: mod_base = OTHER; note = 2'-deoxythymidine
  source 1..21: mol_type = other RNA
tcaaatgatttagtattattt

SEQ ID NO: 1598 - RNA, 21 nt, synthetic construct
  modified_base 20..21: mod_base = OTHER; note = thymine
  modified_base 1: mod_base = OTHER; note = uridine
  modified_base 2: mod_base = OTHER; note = uridine
  modified_base 3: mod_base = cm
  modified_base 4: mod_base = OTHER; note = adenosine
  modified_base 5: mod_base = OTHER; note = adenosine
  modified_base 6: mod_base = OTHER; note = adenosine
  modified_base 7: mod_base = OTHER; note = uridine
  modified_base 8: mod_base = OTHER; note = guanosine
  modified_base 9: mod_base = OTHER; note = adenosine
  modified_base 10: mod_base = OTHER; note = uridine
  modified_base 11: mod_base = OTHER; note = uridine
  modified_base 12: mod_base = um
  modified_base 13: mod_base = OTHER; note = adenosine
  modified_base 14: mod_base = OTHER; note = guanosine
  modified_base 15: mod_base = um
  modified_base 16: mod_base = OTHER; note = adenosine
  modified_base 17: mod_base = OTHER; note = uridine
  modified_base 18: mod_base = um
  modified_base 19: mod_base = OTHER; note = adenosine
  modified_base 20: mod_base = OTHER; note = 2'-deoxythymidine
  modified_base 21: mod_base = OTHER; note = 2'-deoxythymidine
  source 1..21: mol_type = other RNA
ttcaaatgatttagtattatt

SEQ ID NO: 1599 - RNA, 21 nt, synthetic construct
  modified_base 20..21: mod_base = OTHER; note = thymine
  modified_base 1: mod_base = OTHER; note = cytidine
  modified_base 2: mod_base = OTHER; note = uridine
  modified_base 3: mod_base = OTHER; note = uridine
  modified_base 4: mod_base = cm
  modified_base 5: mod_base = OTHER; note = adenosine
  modified_base 6: mod_base = OTHER; note = adenosine
  modified_base 7: mod_base = OTHER; note = adenosine
  modified_base 8: mod_base = OTHER; note = uridine
  modified_base 9: mod_base = OTHER; note = guanosine
  modified_base 10: mod_base = OTHER; note = adenosine
  modified_base 11: mod_base = OTHER; note = uridine
  modified_base 12: mod_base = OTHER; note = uridine
  modified_base 13: mod_base = um
  modified_base 14: mod_base = OTHER; note = adenosine
  modified_base 15: mod_base = OTHER; note = guanosine
  modified_base 16: mod_base = um
  modified_base 17: mod_base = OTHER; note = adenosine
  modified_base 18: mod_base = OTHER; note = uridine
  modified_base 19: mod_base = OTHER; note = uridine
  modified_base 20: mod_base = OTHER; note = 2'-deoxythymidine
  modified_base 21: mod_base = OTHER; note = 2'-deoxythymidine
  source 1..21: mol_type = other RNA
cttcaaatgatttagtatttt

SEQ ID NO: 1600 - RNA, 21 nt, synthetic construct
  modified_base 20..21: mod_base = OTHER; note = thymine
  modified_base 1: mod_base = OTHER; note = uridine
  modified_base 2: mod_base = OTHER; note = cytidine
  modified_base 3: mod_base = OTHER; note = uridine
  modified_base 4: mod_base = OTHER; note = uridine
  modified_base 5: mod_base = cm
  modified_base 6: mod_base = OTHER; note = adenosine
  modified_base 7: mod_base = OTHER; note = adenosine
  modified_base 8: mod_base = OTHER; note = adenosine
  modified_base 9: mod_base = OTHER; note = uridine
  modified_base 10: mod_base = OTHER; note = guanosine
  modified_base 11: mod_base = OTHER; note = adenosine
  modified_base 12: mod_base = OTHER; note = uridine
  modified_base 13: mod_base = OTHER; note = uridine
  modified_base 14: mod_base = um
  modified_base 15: mod_base = OTHER; note = adenosine
  modified_base 16: mod_base = OTHER; note = guanosine
  modified_base 17: mod_base = um
  modified_base 18: mod_base = OTHER; note = adenosine
  modified_base 19: mod_base = OTHER; note = uridine
  modified_base 20: mod_base = OTHER; note = 2'-deoxythymidine
  modified_base 21: mod_base = OTHER; note = 2'-deoxythymidine
  source 1..21: mol_type = other RNA
tcttcaaatgatttagtattt

SEQ ID NO: 1601 - RNA, 21 nt, synthetic construct
  modified_base 20..21: mod_base = OTHER; note = thymine
  modified_base 1: mod_base = OTHER; note = adenosine
  modified_base 2: mod_base = OTHER; note = uridine
  modified_base 3: mod_base = OTHER; note = cytidine
  modified_base 4: mod_base = OTHER; note = uridine
  modified_base 5: mod_base = OTHER; note = uridine
  modified_base 6: mod_base = cm
  modified_base 7: mod_base = OTHER; note = adenosine
  modified_base 8: mod_base = OTHER; note = adenosine
  modified_base 9: mod_base = OTHER; note = adenosine
  modified_base 10: mod_base = OTHER; note = uridine
  modified_base 11: mod_base = OTHER; note = guanosine
  modified_base 12: mod_base = OTHER; note = adenosine
  modified_base 13: mod_base = OTHER; note = uridine
  modified_base 14: mod_base = OTHER; note = uridine
  modified_base 15: mod_base = um
  modified_base 16: mod_base = OTHER; note = adenosine
  modified_base 17: mod_base = OTHER; note = guanosine
  modified_base 18: mod_base = um
  modified_base 19: mod_base = OTHER; note = adenosine
  modified_base 20: mod_base = OTHER; note = 2'-deoxythymidine
  modified_base 21: mod_base = OTHER; note = 2'-deoxythymidine
  source 1..21: mol_type = other RNA
atcttcaaatgatttagtatt

SEQ ID NO: 1602 - RNA, 21 nt, synthetic construct
  modified_base 20..21: mod_base = OTHER; note = thymine
  modified_base 1: mod_base = um
  modified_base 2: mod_base = OTHER; note = adenosine
  modified_base 3: mod_base = OTHER; note = uridine
  modified_base 4: mod_base = OTHER; note = cytidine
  modified_base 5: mod_base = OTHER; note = uridine
  modified_base 6: mod_base = OTHER; note = uridine
  modified_base 7: mod_base = cm
  modified_base 8: mod_base = OTHER; note = adenosine
  modified_base 9: mod_base = OTHER; note = adenosine
  modified_base 10: mod_base = OTHER; note = adenosine
  modified_base 11: mod_base = OTHER; note = uridine
  modified_base 12: mod_base = OTHER; note = guanosine
  modified_base 13: mod_base = OTHER; note = adenosine
  modified_base 14: mod_base = OTHER; note = uridine
  modified_base 15: mod_base = OTHER; note = uridine
  modified_base 16: mod_base = um
  modified_base 17: mod_base = OTHER; note = adenosine
  modified_base 18: mod_base = OTHER; note = guanosine
  modified_base 19: mod_base = OTHER; note = uridine
  modified_base 20: mod_base = OTHER; note = 2'-deoxythymidine
  modified_base 21: mod_base = OTHER; note = 2'-deoxythymidine
  source 1..21: mol_type = other RNA
tatcttcaaatgatttagttt

SEQ ID NO: 1603 - RNA, 21 nt, synthetic construct
  modified_base 20..21: mod_base = OTHER; note = thymine
  modified_base 1: mod_base = OTHER; note = adenosine
  modified_base 2: mod_base = um
  modified_base 3: mod_base = OTHER; note = adenosine
  modified_base 4: mod_base = OTHER; note = uridine
  modified_base 5: mod_base = OTHER; note = cytidine
  modified_base 6: mod_base = OTHER; note = uridine
  modified_base 7: mod_base = OTHER; note = uridine
  modified_base 8: mod_base = cm
  modified_base 9: mod_base = OTHER; note = adenosine
  modified_base 10: mod_base = OTHER; note = adenosine
  modified_base 11: mod_base = OTHER; note = adenosine
  modified_base 12: mod_base = OTHER; note = uridine
  modified_base 13: mod_base = OTHER; note = guanosine
  modified_base 14: mod_base = OTHER; note = adenosine
  modified_base 15: mod_base = OTHER; note = uridine
  modified_base 16: mod_base = OTHER; note = uridine
  modified_base 17: mod_base = um
  modified_base 18: mod_base = OTHER; note = adenosine
  modified_base 19: mod_base = OTHER; note = guanosine
  modified_base 20: mod_base = OTHER; note = 2'-deoxythymidine
  modified_base 21: mod_base = OTHER; note = 2'-deoxythymidine
  source 1..21: mol_type = other RNA
atatcttcaaatgatttagtt

SEQ ID NO: 1604 - RNA, 21 nt, synthetic construct
  modified_base 20..21: mod_base = OTHER; note = thymine
  modified_base 1: mod_base = OTHER; note = adenosine
  modified_base 2: mod_base = OTHER; note = adenosine
  modified_base 3: mod_base = um
  modified_base 4: mod_base = OTHER; note = adenosine
  modified_base 5: mod_base = OTHER; note = uridine
  modified_base 6: mod_base = OTHER; note = cytidine
  modified_base 7: mod_base = OTHER; note = uridine
  modified_base 8: mod_base = OTHER; note = uridine
  modified_base 9: mod_base = cm
  modified_base 10: mod_base = OTHER; note = adenosine
  modified_base 11: mod_base = OTHER; note = adenosine
  modified_base 12: mod_base = OTHER; note = adenosine
  modified_base 13: mod_base = OTHER; note = uridine
  modified_base 14: mod_base = OTHER; note = guanosine
  modified_base 15: mod_base = OTHER; note = adenosine
  modified_base 16: mod_base = OTHER; note = uridine
  modified_base 17: mod_base = OTHER; note = uridine
  modified_base 18: mod_base = um
  modified_base 19: mod_base = OTHER; note = adenosine
  modified_base 20: mod_base = OTHER; note = 2'-deoxythymidine
  modified_base 21: mod_base = OTHER; note = 2'-deoxythymidine
  source 1..21: mol_type = other RNA
aatatcttcaaatgatttatt

SEQ ID NO: 1605 - RNA, 21 nt, synthetic construct
  modified_base 20..21: mod_base = OTHER; note = thymine
  modified_base 1: mod_base = OTHER; note = guanosine
  modified_base 2: mod_base = OTHER; note = adenosine
  modified_base 3: mod_base = OTHER; note = adenosine
  modified_base 4: mod_base = um
  modified_base 5: mod_base = OTHER; note = adenosine
  modified_base 6: mod_base = OTHER; note = uridine
  modified_base 7: mod_base = OTHER; note = cytidine
  modified_base 8: mod_base = OTHER; note = uridine
  modified_base 9: mod_base = OTHER; note = uridine
  modified_base 10: mod_base = cm
  modified_base 11: mod_base = OTHER; note = adenosine
  modified_base 12: mod_base = OTHER; note = adenosine
  modified_base 13: mod_base = OTHER; note = adenosine
  modified_base 14: mod_base = OTHER; note = uridine
  modified_base 15: mod_base = OTHER; note = guanosine
  modified_base 16: mod_base = OTHER; note = adenosine
  modified_base 17: mod_base = OTHER; note = uridine
  modified_base 18: mod_base = OTHER; note = uridine
  modified_base 19: mod_base = OTHER; note = uridine
  modified_base 20: mod_base = OTHER; note = 2'-deoxythymidine
  modified_base 21: mod_base = OTHER; note = 2'-deoxythymidine
  source 1..21: mol_type = other RNA
gaatatcttcaaatgattttt

SEQ ID NO: 1606 - RNA, 21 nt, synthetic construct
  modified_base 20..21: mod_base = OTHER; note = thymine
  modified_base 1: mod_base = OTHER; note = uridine
  modified_base 2: mod_base = OTHER; note = guanosine
  modified_base 3: mod_base = OTHER; note = adenosine
  modified_base 4: mod_base = OTHER; note = adenosine
  modified_base 5: mod_base = um
  modified_base 6: mod_base = OTHER; note = adenosine
  modified_base 7: mod_base = OTHER; note = uridine
  modified_base 8: mod_base = OTHER; note = cytidine
  modified_base 9: mod_base = OTHER; note = uridine
  modified_base 10: mod_base = OTHER; note = uridine
  modified_base 11: mod_base = cm
  modified_base 12: mod_base = OTHER; note = adenosine
  modified_base 13: mod_base = OTHER; note = adenosine
  modified_base 14: mod_base = OTHER; note = adenosine
  modified_base 15: mod_base = OTHER; note = uridine
  modified_base 16: mod_base = OTHER; note = guanosine
  modified_base 17: mod_base = OTHER; note = adenosine
  modified_base 18: mod_base = OTHER; note = uridine
  modified_base 19: mod_base = OTHER; note = uridine
  modified_base 20: mod_base = OTHER; note = 2'-deoxythymidine
  modified_base 21: mod_base = OTHER; note = 2'-deoxythymidine
  source 1..21: mol_type = other RNA
tgaatatcttcaaatgatttt

SEQ ID NO: 1607 - RNA, 21 nt, synthetic construct
  modified_base 20..21: mod_base = OTHER; note = thymine
  modified_base 1: mod_base = OTHER; note = guanosine
  modified_base 2: mod_base = OTHER; note = guanosine
  modified_base 3: mod_base = OTHER; note = uridine
  modified_base 4: mod_base = OTHER; note = guanosine
  modified_base 5: mod_base = OTHER; note = adenosine
  modified_base 6: mod_base = OTHER; note = adenosine
  modified_base 7: mod_base = um
  modified_base 8: mod_base = OTHER; note = adenosine
  modified_base 9: mod_base = OTHER; note = uridine
  modified_base 10: mod_base = OTHER; note = cytidine
  modified_base 11: mod_base = OTHER; note = uridine
  modified_base 12: mod_base = OTHER; note = uridine
  modified_base 13: mod_base = cm
  modified_base 14: mod_base = OTHER; note = adenosine
  modified_base 15: mod_base = OTHER; note = adenosine
  modified_base 16: mod_base = OTHER; note = adenosine
  modified_base 17: mod_base = OTHER; note = uridine
  modified_base 18: mod_base = OTHER; note = guanosine
  modified_base 19: mod_base = OTHER; note = adenosine
  modified_base 20: mod_base = OTHER; note = 2'-deoxythymidine
  modified_base 21: mod_base = OTHER; note = 2'-deoxythymidine
  source 1..21: mol_type = other RNA
ggtgaatatcttcaaatgatt

SEQ ID NO: 1608 - RNA, 21 nt, synthetic construct
  modified_base 20..21: mod_base = OTHER; note = thymine
  modified_base 1: mod_base = OTHER; note = uridine
  modified_base 2: mod_base = OTHER; note = guanosine
  modified_base 3: mod_base = OTHER; note = guanosine
  modified_base 4: mod_base = OTHER; note = uridine
  modified_base 5: mod_base = OTHER; note = guanosine
  modified_base 6: mod_base = OTHER; note = adenosine
  modified_base 7: mod_base = OTHER; note = adenosine
  modified_base 8: mod_base = um
  modified_base 9: mod_base = OTHER; note = adenosine
  modified_base 10: mod_base = OTHER; note = uridine
  modified_base 11: mod_base = OTHER; note = cytidine
  modified_base 12: mod_base = OTHER; note = uridine
  modified_base 13: mod_base = OTHER; note = uridine
  modified_base 14: mod_base = cm
  modified_base 15: mod_base = OTHER; note = adenosine
  modified_base 16: mod_base = OTHER; note = adenosine
  modified_base 17: mod_base = OTHER; note = adenosine
  modified_base 18: mod_base = OTHER; note = uridine
  modified_base 19: mod_base = OTHER; note = guanosine
  modified_base 20: mod_base = OTHER; note = 2'-deoxythymidine
  modified_base 21: mod_base = OTHER; note = 2'-deoxythymidine
  source 1..21: mol_type = other RNA
tggtgaatatcttcaaatgtt

SEQ ID NO: 1609 - RNA, 21 nt, synthetic construct
  modified_base 20..21: mod_base = OTHER; note = thymine
  modified_base 1: mod_base = OTHER; note = adenosine
  modified_base 2: mod_base = OTHER; note = uridine
  modified_base 3: mod_base = OTHER; note = guanosine
  modified_base 4: mod_base = OTHER; note = guanosine
  modified_base 5: mod_base = OTHER; note = uridine
  modified_base 6: mod_base = OTHER; note = guanosine
  modified_base 7: mod_base = OTHER; note = adenosine
  modified_base 8: mod_base = OTHER; note = adenosine
  modified_base 9: mod_base = um
  modified_base 10: mod_base = OTHER; note = adenosine
  modified_base 11: mod_base = OTHER; note = uridine
  modified_base 12: mod_base = OTHER; note = cytidine
  modified_base 13: mod_base = OTHER; note = uridine
  modified_base 14: mod_base = OTHER; note = uridine
  modified_base 15: mod_base = cm
  modified_base 16: mod_base = OTHER; note = adenosine
  modified_base 17: mod_base = OTHER; note = adenosine
  modified_base 18: mod_base = OTHER; note = adenosine
  modified_base 19: mod_base = OTHER; note = uridine
  modified_base 20: mod_base = OTHER; note = 2'-deoxythymidine
  modified_base 21: mod_base = OTHER; note = 2'-deoxythymidine
  source 1..21: mol_type = other RNA
atggtgaatatcttcaaattt

SEQ ID NO: 1610 - RNA, 21 nt, synthetic construct
  modified_base 20..21: mod_base = OTHER; note = thymine
  modified_base 1: mod_base = OTHER; note = adenosine
  modified_base 2: mod_base = OTHER; note = adenosine
  modified_base 3: mod_base = OTHER; note = uridine
  modified_base 4: mod_base = OTHER; note = guanosine
  modified_base 5: mod_base = OTHER; note = guanosine
  modified_base 6: mod_base = OTHER; note = uridine
  modified_base 7: mod_base = OTHER; note = guanosine
  modified_base 8: mod_base = OTHER; note = adenosine
  modified_base 9: mod_base = OTHER; note = adenosine
  modified_base 10: mod_base = um
  modified_base 11: mod_base = OTHER; note = adenosine
  modified_base 12: mod_base = OTHER; note = uridine
  modified_base 13: mod_base = OTHER; note = cytidine
  modified_base 14: mod_base = OTHER; note = uridine
  modified_base 15: mod_base = OTHER; note = uridine
  modified_base 16: mod_base = cm
  modified_base 17: mod_base = OTHER; note = adenosine
  modified_base 18: mod_base = OTHER; note = adenosine
  modified_base 19: mod_base = OTHER; note = adenosine
  modified_base 20: mod_base = OTHER; note = 2'-deoxythymidine
  modified_base 21: mod_base = OTHER; note = 2'-deoxythymidine
  source 1..21: mol_type = other RNA
aatggtgaatatcttcaaatt

SEQ ID NO: 1611 - RNA, 21 nt, synthetic construct
  modified_base 20..21: mod_base = OTHER; note = thymine
  modified_base 1: mod_base = um
  modified_base 2: mod_base = OTHER; note = adenosine
  modified_base 3: mod_base = OTHER; note = adenosine
  modified_base 4: mod_base = OTHER; note = uridine
  modified_base 5: mod_base = OTHER; note = guanosine
  modified_base 6: mod_base = OTHER; note = guanosine
  modified_base 7: mod_base = OTHER; note = uridine
  modified_base 8: mod_base = OTHER; note = guanosine
  modified_base 9: mod_base = OTHER; note = adenosine
  modified_base 10: mod_base = OTHER; note = adenosine
  modified_base 11: mod_base = um
  modified_base 12: mod_base = OTHER; note = adenosine
  modified_base 13: mod_base = OTHER; note = uridine
  modified_base 14: mod_base = OTHER; note = cytidine
  modified_base 15: mod_base = OTHER; note = uridine
  modified_base 16: mod_base = OTHER; note = uridine
  modified_base 17: mod_base = cm
  modified_base 18: mod_base = OTHER; note = adenosine
  modified_base 19: mod_base = OTHER; note = adenosine
  modified_base 20: mod_base = OTHER; note = 2'-deoxythymidine
  modified_base 21: mod_base = OTHER; note = 2'-deoxythymidine
  source 1..21: mol_type = other RNA
taatggtgaatatcttcaatt

SEQ ID NO: 1612 - RNA, 21 nt, synthetic construct
  modified_base 20..21: mod_base = OTHER; note = thymine
  modified_base 1: mod_base = OTHER; note = adenosine
  modified_base 2: mod_base = OTHER; note = cytidine
  modified_base 3: mod_base = OTHER; note = uridine
  modified_base 4: mod_base = OTHER; note = cytidine
  modified_base 5: mod_base = OTHER; note = uridine
  modified_base 6: mod_base = OTHER; note = uridine
  modified_base 7: mod_base = OTHER; note = uridine
  modified_base 8: mod_base = um
  modified_base 9: mod_base = OTHER; note = adenosine
  modified_base 10: mod_base = OTHER; note = adenosine
  modified_base 11: mod_base = OTHER; note = uridine
  modified_base 12: mod_base = OTHER; note = uridine
  modified_base 13: mod_base = OTHER; note = uridine
  modified_base 14: mod_base = OTHER; note = guanosine
  modified_base 15: mod_base = OTHER; note = uridine
  modified_base 16: mod_base = OTHER; note = uridine
  modified_base 17: mod_base = OTHER; note = cytidine
  modified_base 18: mod_base = OTHER; note = uridine
  modified_base 19: mod_base = OTHER; note = cytidine
  modified_base 20: mod_base = OTHER; note = 2'-deoxythymidine
  modified_base 21: mod_base = OTHER; note = 2'-deoxythymidine
  source 1..21: mol_type = other RNA
actcttttaatttgttctctt

SEQ ID NO: 1613 - RNA, 21 nt, synthetic construct
  modified_base 20..21: mod_base = OTHER; note = thymine
  modified_base 1: mod_base = OTHER; note = adenosine
  modified_base 2: mod_base = OTHER; note = adenosine
  modified_base 3: mod_base = OTHER; note = cytidine
  modified_base 4: mod_base = OTHER; note = uridine
  modified_base 5: mod_base = OTHER; note = cytidine
  modified_base 6: mod_base = OTHER; note = uridine
  modified_base 7: mod_base = OTHER; note = uridine
  modified_base 8: mod_base = OTHER; note = uridine
  modified_base 9: mod_base = um
  modified_base 10: mod_base = OTHER; note = adenosine
  modified_base 11: mod_base = OTHER; note = adenosine
  modified_base 12: mod_base = OTHER; note = uridine
  modified_base 13: mod_base = OTHER; note = uridine
  modified_base 14: mod_base = OTHER; note = uridine
  modified_base 15: mod_base = OTHER; note = guanosine
  modified_base 16: mod_base = OTHER; note = uridine
  modified_base 17: mod_base = OTHER; note = uridine
  modified_base 18: mod_base = OTHER; note = cytidine
  modified_base 19: mod_base = OTHER; note = uridine
  modified_base 20: mod_base = OTHER; note = 2'-deoxythymidine
  modified_base 21: mod_base = OTHER; note = 2'-deoxythymidine
  source 1..21: mol_type = other RNA
aactcttttaatttgttcttt

SEQ ID NO: 1614 - RNA, 21 nt, synthetic construct
  modified_base 20..21: mod_base = OTHER; note = thymine
  modified_base 1: mod_base = um
  modified_base 2: mod_base = OTHER; note = adenosine
  modified_base 3: mod_base = OTHER; note = adenosine
  modified_base 4: mod_base = OTHER; note = cytidine
  modified_base 5: mod_base = OTHER; note = uridine
  modified_base 6: mod_base = OTHER; note = cytidine
  modified_base 7: mod_base = OTHER; note = uridine
  modified_base 8: mod_base = OTHER; note = uridine
  modified_base 9: mod_base = OTHER; note = uridine
  modified_base 10: mod_base = um
  modified_base 11: mod_base = OTHER; note = adenosine
  modified_base 12: mod_base = OTHER; note = adenosine
  modified_base 13: mod_base = OTHER; note = uridine
  modified_base 14: mod_base = OTHER; note = uridine
  modified_base 15: mod_base = OTHER; note = uridine
  modified_base 16: mod_base = OTHER; note = guanosine
  modified_base 17: mod_base = OTHER; note = uridine
  modified_base 18: mod_base = OTHER; note = uridine
  modified_base 19: mod_base = OTHER; note = cytidine
  modified_base 20: mod_base = OTHER; note = 2'-deoxythymidine
  modified_base 21: mod_base = OTHER; note = 2'-deoxythymidine
  source 1..21: mol_type = other RNA
taactcttttaatttgttctt

SEQ ID NO: 1615 - RNA, 21 nt, synthetic construct
  modified_base 20..21: mod_base = OTHER; note = thymine
  modified_base 1: mod_base = OTHER; note = uridine
  modified_base 2: mod_base = um
  modified_base 3: mod_base = OTHER; note = adenosine
  modified_base 4: mod_base = OTHER; note = adenosine
  modified_base 5: mod_base = OTHER; note = cytidine
  modified_base 6: mod_base = OTHER; note = uridine
  modified_base 7: mod_base = OTHER; note = cytidine
  modified_base 8: mod_base = OTHER; note = uridine
  modified_base 9: mod_base = OTHER; note = uridine
  modified_base 10: mod_base = OTHER; note = uridine
  modified_base 11: mod_base = um
  modified_base 12: mod_base = OTHER; note = adenosine
  modified_base 13: mod_base = OTHER; note = adenosine
  modified_base 14: mod_base = OTHER; note = uridine
  modified_base 15: mod_base = OTHER; note = uridine
  modified_base 16: mod_base = OTHER; note = uridine
  modified_base 17: mod_base = OTHER; note = guanosine
  modified_base 18: mod_base = OTHER; note = uridine
  modified_base 19: mod_base = OTHER; note = uridine
  modified_base 20: mod_base = OTHER; note = 2'-deoxythymidine
  modified_base 21: mod_base = OTHER; note = 2'-deoxythymidine
  source 1..21: mol_type = other RNA
ttaactcttttaatttgtttt

SEQ ID NO: 1616 - RNA, 21 nt, synthetic construct
  modified_base 20..21: mod_base = OTHER; note = thymine
  modified_base 1: mod_base = OTHER; note = cytidine
  modified_base 2: mod_base = OTHER; note = uridine
  modified_base 3: mod_base = um
  modified_base 4: mod_base = OTHER; note = adenosine
  modified_base 5: mod_base = OTHER; note = adenosine
  modified_base 6: mod_base = OTHER; note = cytidine
  modified_base 7: mod_base = OTHER; note = uridine
  modified_base 8: mod_base = OTHER; note = cytidine
  modified_base 9: mod_base = OTHER; note = uridine
  modified_base 10: mod_base = OTHER; note = uridine
  modified_base 11: mod_base = OTHER; note = uridine
  modified_base 12: mod_base = um
  modified_base 13: mod_base = OTHER; note = adenosine
  modified_base 14: mod_base = OTHER; note = adenosine
  modified_base 15: mod_base = OTHER; note = uridine
  modified_base 16: mod_base = OTHER; note = uridine
  modified_base 17: mod_base = OTHER; note = uridine
  modified_base 18: mod_base = OTHER; note = guanosine
  modified_base 19: mod_base = OTHER; note = uridine
  modified_base 20: mod_base = OTHER; note = 2'-deoxythymidine
  modified_base 21: mod_base = OTHER; note = 2'-deoxythymidine
  source 1..21: mol_type = other RNA
cttaactcttttaatttgttt

SEQ ID NO: 1617 - RNA, 21 nt, synthetic construct
  modified_base 20..21: mod_base = OTHER; note = thymine
  modified_base 1: mod_base = OTHER; note = cytidine
  modified_base 2: mod_base = OTHER; note = cytidine
  modified_base 3: mod_base = OTHER; note = uridine
  modified_base 4: mod_base = um
  modified_base 5: mod_base = OTHER; note = adenosine
  modified_base 6: mod_base = OTHER; note = adenosine
  modified_base 7: mod_base = OTHER; note = cytidine
  modified_base 8: mod_base = OTHER; note = uridine
  modified_base 9: mod_base = OTHER; note = cytidine
  modified_base 10: mod_base = OTHER; note = uridine
  modified_base 11: mod_base = OTHER; note = uridine
  modified_base 12: mod_base = OTHER; note = uridine
  modified_base 13: mod_base = um
  modified_base 14: mod_base = OTHER; note = adenosine
  modified_base 15: mod_base = OTHER; note = adenosine
  modified_base 16: mod_base = OTHER; note = uridine
  modified_base 17: mod_base = OTHER; note = uridine
  modified_base 18: mod_base = OTHER; note = uridine
  modified_base 19: mod_base = OTHER; note = guanosine
  modified_base 20: mod_base = OTHER; note = 2'-deoxythymidine
  modified_base 21: mod_base = OTHER; note = 2'-deoxythymidine
  source 1..21: mol_type = other RNA
ccttaactcttttaatttgtt

SEQ ID NO: 1618 - RNA, 21 nt, synthetic construct
  modified_base 20..21: mod_base = OTHER; note = thymine
  modified_base 1: mod_base = OTHER; note = uridine
  modified_base 2: mod_base = OTHER; note = cytidine
  modified_base 3: mod_base = OTHER; note = cytidine
  modified_base 4: mod_base = OTHER; note = uridine
  modified_base 5: mod_base = um
  modified_base 6: mod_base = OTHER; note = adenosine
  modified_base 7: mod_base = OTHER; note = adenosine
  modified_base 8: mod_base = OTHER; note = cytidine
  modified_base 9: mod_base = OTHER; note = uridine
  modified_base 10: mod_base = OTHER; note = cytidine
  modified_base 11: mod_base = OTHER; note = uridine
  modified_base 12: mod_base = OTHER; note = uridine
  modified_base 13: mod_base = OTHER; note = uridine
  modified_base 14: mod_base = um
  modified_base 15: mod_base = OTHER; note = adenosine
  modified_base 16: mod_base = OTHER; note = adenosine
  modified_base 17: mod_base = OTHER; note = uridine
  modified_base 18: mod_base = OTHER; note = uridine
  modified_base 19: mod_base = OTHER; note = uridine
  modified_base 20: mod_base = OTHER; note = 2'-deoxythymidine
  modified_base 21: mod_base = OTHER; note = 2'-deoxythymidine
  source 1..21: mol_type = other RNA
tccttaactcttttaattttt

SEQ ID NO: 1619 - RNA, 21 nt, synthetic construct
  modified_base 20..21: mod_base = OTHER; note = thymine
  modified_base 1: mod_base = OTHER; note = guanosine
  modified_base 2: mod_base = OTHER; note = uridine
  modified_base 3: mod_base = OTHER; note = cytidine
  modified_base 4: mod_base = OTHER; note = cytidine
  modified_base 5: mod_base = OTHER; note = uridine
  modified_base 6: mod_base = um
  modified_base 7: mod_base = OTHER; note = adenosine
  modified_base 8: mod_base = OTHER; note = adenosine
  modified_base 9: mod_base = OTHER; note = cytidine
  modified_base 10: mod_base = OTHER; note = uridine
  modified_base 11: mod_base = OTHER; note = cytidine
  modified_base 12: mod_base = OTHER; note = uridine
  modified_base 13: mod_base = OTHER; note = uridine
  modified_base 14: mod_base = OTHER; note = uridine
  modified_base 15: mod_base = um
  modified_base 16: mod_base = OTHER; note = adenosine
  modified_base 17: mod_base = OTHER; note = adenosine
  modified_base 18: mod_base = OTHER; note = uridine
  modified_base 19: mod_base = OTHER; note = uridine
  modified_base 20: mod_base = OTHER; note = 2'-deoxythymidine
  modified_base 21: mod_base = OTHER; note = 2'-deoxythymidine
  source 1..21: mol_type = other RNA
gtccttaactcttttaatttt

SEQ ID NO: 1620 - RNA, 21 nt, synthetic construct
  modified_base 20..21: mod_base = OTHER; note = thymine
  modified_base 1: mod_base = OTHER; note = adenosine
  modified_base 2: mod_base = OTHER; note = guanosine
  modified_base 3: mod_base = OTHER; note = uridine
  modified_base 4: mod_base = OTHER; note = cytidine
  modified_base 5: mod_base = OTHER; note = cytidine
  modified_base 6: mod_base = OTHER; note = uridine
  modified_base 7: mod_base = um
  modified_base 8: mod_base = OTHER; note = adenosine
  modified_base 9: mod_base = OTHER; note = adenosine
  modified_base 10: mod_base = OTHER; note = cytidine
  modified_base 11: mod_base = OTHER; note = uridine
  modified_base 12: mod_base = OTHER; note = cytidine
  modified_base 13: mod_base = OTHER; note = uridine
  modified_base 14: mod_base = OTHER; note = uridine
  modified_base 15: mod_base = OTHER; note = uridine
  modified_base 16: mod_base = um
  modified_base 17: mod_base = OTHER; note = adenosine
  modified_base 18: mod_base = OTHER; note = adenosine
  modified_base 19: mod_base = OTHER; note = uridine
  modified_base 20: mod_base = OTHER; note = 2'-deoxythymidine
  modified_base 21: mod_base = OTHER; note = 2'-deoxythymidine
  source 1..21: mol_type = other RNA
agtccttaactcttttaattt

SEQ ID NO: 1621 - RNA, 21 nt, synthetic construct
  modified_base 20..21: mod_base = OTHER; note = thymine
  modified_base 1: mod_base = OTHER; note = guanosine
  modified_base 2: mod_base = OTHER; note = adenosine
  modified_base 3: mod_base = OTHER; note = guanosine
  modified_base 4: mod_base = OTHER; note = uridine
  modified_base 5: mod_base = OTHER; note = cytidine
  modified_base 6: mod_base = OTHER; note = cytidine
  modified_base 7: mod_base = OTHER; note = uridine
  modified_base 8: mod_base = um
  modified_base 9: mod_base = OTHER; note = adenosine
  modified_base 10: mod_base = OTHER; note = adenosine
  modified_base 11: mod_base = OTHER; note = cytidine
  modified_base 12: mod_base = OTHER; note = uridine
  modified_base 13: mod_base = OTHER; note = cytidine
  modified_base 14: mod_base = OTHER; note = uridine
  modified_base 15: mod_base = OTHER; note = uridine
  modified_base 16: mod_base = OTHER; note = uridine
  modified_base 17: mod_base = um
  modified_base 18: mod_base = OTHER; note = adenosine
  modified_base 19: mod_base = OTHER; note = adenosine
  modified_base 20: mod_base = OTHER; note = 2'-deoxythymidine
  modified_base 21: mod_base = OTHER; note = 2'-deoxythymidine
  source 1..21: mol_type = other RNA
gagtccttaactcttttaatt

SEQ ID NO: 1622 - RNA, 21 nt, synthetic construct
  modified_base 20..21: mod_base = OTHER; note = thymine
  modified_base 1: mod_base = OTHER; note = adenosine
  modified_base 2: mod_base = OTHER; note = guanosine
  modified_base 3: mod_base = OTHER; note = adenosine
  modified_base 4: mod_base = OTHER; note = guanosine
  modified_base 5: mod_base = OTHER; note = uridine
  modified_base 6: mod_base = OTHER; note = cytidine
  modified_base 7: mod_base = OTHER; note = cytidine
  modified_base 8: mod_base = OTHER; note = uridine
  modified_base 9: mod_base = um
  modified_base 10: mod_base = OTHER; note = adenosine
  modified_base 11: mod_base = OTHER; note = adenosine
  modified_base 12: mod_base = OTHER; note = cytidine
  modified_base 13: mod_base = OTHER; note = uridine
  modified_base 14: mod_base = OTHER; note = cytidine
  modified_base 15: mod_base = OTHER; note = uridine
  modified_base 16: mod_base = OTHER; note = uridine
  modified_base 17: mod_base = OTHER; note = uridine
  modified_base 18: mod_base = um
  modified_base 19: mod_base = OTHER; note = adenosine
  modified_base 20: mod_base = OTHER; note = 2'-deoxythymidine
  modified_base 21: mod_base = OTHER; note = 2'-deoxythymidine
  source 1..21: mol_type = other RNA
agagtccttaactcttttatt

SEQ ID NO: 1623 - RNA, 21 nt, synthetic construct
  modified_base 20..21: mod_base = OTHER; note = thymine
  modified_base 1: mod_base = cm
  modified_base 2: mod_base = OTHER; note = adenosine
  modified_base 3: mod_base = OTHER; note = guanosine
  modified_base 4: mod_base = OTHER; note = adenosine
  modified_base 5: mod_base = OTHER; note = guanosine
  modified_base 6: mod_base = OTHER; note = uridine
  modified_base 7: mod_base = OTHER; note = cytidine
  modified_base 8: mod_base = OTHER; note = cytidine
  modified_base 9: mod_base = OTHER; note = uridine
  modified_base 10: mod_base = um
  modified_base 11: mod_base = OTHER; note = adenosine
  modified_base 12: mod_base = OTHER; note = adenosine
  modified_base 13: mod_base = OTHER; note = cytidine
  modified_base 14: mod_base = OTHER; note = uridine
  modified_base 15: mod_base = OTHER; note = cytidine
  modified_base 16: mod_base = OTHER; note = uridine
  modified_base 17: mod_base = OTHER; note = uridine
  modified_base 18: mod_base = OTHER; note = uridine
  modified_base 19: mod_base = OTHER; note = uridine
  modified_base 20: mod_base = OTHER; note = 2'-deoxythymidine
  modified_base 21: mod_base = OTHER; note = 2'-deoxythymidine
  source 1..21: mol_type = other RNA
cagagtccttaactctttttt

SEQ ID NO: 1624 - RNA, 21 nt, synthetic construct
  modified_base 20..21: mod_base = OTHER; note = thymine
  modified_base 1: mod_base = OTHER; note = uridine
  modified_base 2: mod_base = cm
  modified_base 3: mod_base = OTHER; note = adenosine
  modified_base 4: mod_base = OTHER; note = guanosine
  modified_base 5: mod_base = OTHER; note = adenosine
  modified_base 6: mod_base = OTHER; note = guanosine
  modified_base 7: mod_base = OTHER; note = uridine
  modified_base 8: mod_base = OTHER; note = cytidine
  modified_base 9: mod_base = OTHER; note = cytidine
  modified_base 10: mod_base = OTHER; note = uridine
  modified_base 11: mod_base = um
  modified_base 12: mod_base = OTHER; note = adenosine
  modified_base 13: mod_base = OTHER; note = adenosine
  modified_base 14: mod_base = OTHER; note = cytidine
  modified_base 15: mod_base = OTHER; note = uridine
  modified_base 16: mod_base = OTHER; note = cytidine
  modified_base 17: mod_base = OTHER; note = uridine
  modified_base 18: mod_base = OTHER; note = uridine
  modified_base 19: mod_base = OTHER; note = uridine
  modified_base 20: mod_base = OTHER; note = 2'-deoxythymidine
  modified_base 21: mod_base = OTHER; note = 2'-deoxythymidine
  source 1..21: mol_type = other RNA
tcagagtccttaactcttttt

SEQ ID NO: 1625 - RNA, 21 nt, synthetic construct
  modified_base 20..21: mod_base = OTHER; note = thymine
  modified_base 1: mod_base = OTHER; note = uridine
  modified_base 2: mod_base = OTHER; note = uridine
  modified_base 3: mod_base = cm
  modified_base 4: mod_base = OTHER; note = adenosine
  modified_base 5: mod_base = OTHER; note = guanosine
  modified_base 6: mod_base = OTHER; note = adenosine
  modified_base 7: mod_base = OTHER; note = guanosine
  modified_base 8: mod_base = OTHER; note = uridine
  modified_base 9: mod_base = OTHER; note = cytidine
  modified_base 10: mod_base = OTHER; note = cytidine
  modified_base 11: mod_base = OTHER; note = uridine
  modified_base 12: mod_base = um
  modified_base 13: mod_base = OTHER; note = adenosine
  modified_base 14: mod_base = OTHER; note = adenosine
  modified_base 15: mod_base = OTHER; note = cytidine
  modified_base 16: mod_base = OTHER; note = uridine
  modified_base 17: mod_base = OTHER; note = cytidine
  modified_base 18: mod_base = OTHER; note = uridine
  modified_base 19: mod_base = OTHER; note = uridine
  modified_base 20: mod_base = OTHER; note = 2'-deoxythymidine
  modified_base 21: mod_base = OTHER; note = 2'-deoxythymidine
  source 1..21: mol_type = other RNA
ttcagagtccttaactctttt

SEQ ID NO: 1626 - RNA, 21 nt, synthetic construct
  modified_base 20..21: mod_base = OTHER; note = thymine
  modified_base 1: mod_base = OTHER; note = uridine
  modified_base 2: mod_base = OTHER; note = cytidine
  modified_base 3: mod_base = OTHER; note = uridine
  modified_base 4: mod_base = OTHER; note = uridine
  modified_base 5: mod_base = cm
  modified_base 6: mod_base = OTHER; note = adenosine
  modified_base 7: mod_base = OTHER; note = guanosine
  modified_base 8: mod_base = OTHER; note = adenosine
  modified_base 9: mod_base = OTHER; note = guanosine
  modified_base 10: mod_base = OTHER; note = uridine
  modified_base 11: mod_base = OTHER; note = cytidine
  modified_base 12: mod_base = OTHER; note = cytidine
  modified_base 13: mod_base = OTHER; note = uridine
  modified_base 14: mod_base = um
  modified_base 15: mod_base = OTHER; note = adenosine
  modified_base 16: mod_base = OTHER; note = adenosine
  modified_base 17: mod_base = OTHER; note = cytidine
  modified_base 18: mod_base = OTHER; note = uridine
  modified_base 19: mod_base = OTHER; note = cytidine
  modified_base 20: mod_base = OTHER; note = 2'-deoxythymidine
  modified_base 21: mod_base = OTHER; note = 2'-deoxythymidine
  source 1..21: mol_type = other RNA
tcttcagagtccttaactctt

SEQ ID NO: 1627 - RNA, 21 nt, synthetic construct
  modified_base 20..21: mod_base = OTHER; note = thymine
  modified_base 1: mod_base = OTHER; note = adenosine
  modified_base 2: mod_base = OTHER; note = uridine
  modified_base 3: mod_base = OTHER; note = cytidine
  modified_base 4: mod_base = OTHER; note = uridine
  modified_base 5: mod_base = OTHER; note = uridine
  modified_base 6: mod_base = cm
  modified_base 7: mod_base = OTHER; note = adenosine
  modified_base 8: mod_base = OTHER; note = guanosine
  modified_base 9: mod_base = OTHER; note = adenosine
  modified_base 10: mod_base = OTHER; note = guanosine
  modified_base 11: mod_base = OTHER; note = uridine
  modified_base 12: mod_base = OTHER; note = cytidine
  modified_base 13: mod_base = OTHER; note = cytidine
  modified_base 14: mod_base = OTHER; note = uridine
  modified_base 15: mod_base = um
  modified_base 16: mod_base = OTHER; note = adenosine
  modified_base 17: mod_base = OTHER; note = adenosine
  modified_base 18: mod_base = OTHER; note = cytidine
  modified_base 19: mod_base = OTHER; note = uridine
  modified_base 20: mod_base = OTHER; note = 2'-deoxythymidine
  modified_base 21: mod_base = OTHER; note = 2'-deoxythymidine
  source 1..21: mol_type = other RNA
atcttcagagtccttaacttt

SEQ ID NO: 1628 - RNA, 21 nt, synthetic construct
  modified_base 20..21: mod_base = OTHER; note = thymine
  modified_base 1: mod_base = cm
  modified_base 2: mod_base = OTHER; note = adenosine
  modified_base 3: mod_base = OTHER; note = uridine
  modified_base 4: mod_base = OTHER; note = cytidine
  modified_base 5: mod_base = OTHER; note = uridine
  modified_base 6: mod_base = OTHER; note = uridine
  modified_base 7: mod_base = cm
  modified_base 8: mod_base = OTHER; note = adenosine
  modified_base 9: mod_base = OTHER; note = guanosine
  modified_base 10: mod_base = OTHER; note = adenosine
  modified_base 11: mod_base = OTHER; note = guanosine
  modified_base 12: mod_base = OTHER; note = uridine
  modified_base 13: mod_base = OTHER; note = cytidine
  modified_base 14: mod_base = OTHER; note = cytidine
  modified_base 15: mod_base = OTHER; note = uridine
  modified_base 16: mod_base = um
  modified_base 17: mod_base = OTHER; note = adenosine
  modified_base 18: mod_base = OTHER; note = adenosine
  modified_base 19: mod_base = OTHER; note = cytidine
  modified_base 20: mod_base = OTHER; note = 2'-deoxythymidine
  modified_base 21: mod_base = OTHER; note = 2'-deoxythymidine
  source 1..21: mol_type = other RNA
catcttcagagtccttaactt

SEQ ID NO: 1629 - RNA, 21 nt, synthetic construct
  modified_base 20..21: mod_base = OTHER; note = thymine
  modified_base 1: mod_base = OTHER; note = adenosine
  modified_base 2: mod_base = cm
  modified_base 3: mod_base = OTHER; note = adenosine
  modified_base 4: mod_base = OTHER; note = uridine
  modified_base 5: mod_base = OTHER; note = cytidine
  modified_base 6: mod_base = OTHER; note = uridine
  modified_base 7: mod_base = OTHER; note = uridine
  modified_base 8: mod_base = cm
  modified_base 9: mod_base = OTHER; note = adenosine
  modified_base 10: mod_base = OTHER; note = guanosine
  modified_base 11: mod_base = OTHER; note = adenosine
  modified_base 12: mod_base = OTHER; note = guanosine
  modified_base 13: mod_base = OTHER; note = uridine
  modified_base 14: mod_base = OTHER; note = cytidine
  modified_base 15: mod_base = OTHER; note = cytidine
  modified_base 16: mod_base = OTHER; note = uridine
  modified_base 17: mod_base = um
  modified_base 18: mod_base = OTHER; note = adenosine
  modified_base 19: mod_base = OTHER; note = adenosine
  modified_base 20: mod_base = OTHER; note = 2'-deoxythymidine
  modified_base 21: mod_base = OTHER; note = 2'-deoxythymidine
  source 1..21: mol_type = other RNA
acatcttcagagtccttaatt

SEQ ID NO: 1630 - RNA, 21 nt, synthetic construct
  modified_base 20..21: mod_base = OTHER; note = thymine
  modified_base 1: mod_base = OTHER; note = guanosine
  modified_base 2: mod_base = um
  modified_base 3: mod_base = OTHER; note = adenosine
  modified_base 4: mod_base = cm
  modified_base 5: mod_base = OTHER; note = adenosine
  modified_base 6: mod_base = OTHER; note = uridine
  modified_base 7: mod_base = OTHER; note = cytidine
  modified_base 8: mod_base = OTHER; note = uridine
  modified_base 9: mod_base = OTHER; note = uridine
  modified_base 10: mod_base = cm
  modified_base 11: mod_base = OTHER; note = adenosine
  modified_base 12: mod_base = OTHER; note = guanosine
  modified_base 13: mod_base = OTHER; note = adenosine
  modified_base 14: mod_base = OTHER; note = guanosine
  modified_base 15: mod_base = OTHER; note = uridine
  modified_base 16: mod_base = OTHER; note = cytidine
  modified_base 17: mod_base = OTHER; note = cytidine
  modified_base 18: mod_base = OTHER; note = uridine
  modified_base 19: mod_base = OTHER; note = uridine
  modified_base 20: mod_base = OTHER; note = 2'-deoxythymidine
  modified_base 21: mod_base = OTHER; note = 2'-deoxythymidine
  source 1..21: mol_type = other RNA
gtacatcttcagagtcctttt

SEQ ID NO: 1631 - RNA, 21 nt, synthetic construct
  modified_base 20..21: mod_base = OTHER; note = thymine
  modified_base 1: mod_base = OTHER; note = guanosine
  modified_base 2: mod_base = OTHER; note = guanosine
  modified_base 3: mod_base = um
  modified_base 4: mod_base = OTHER; note = adenosine
  modified_base 5: mod_base = cm
  modified_base 6: mod_base = OTHER; note = adenosine
  modified_base 7: mod_base = OTHER; note = uridine
  modified_base 8: mod_base = OTHER; note = cytidine
  modified_base 9: mod_base = OTHER; note = uridine
  modified_base 10: mod_base = OTHER; note = uridine
  modified_base 11: mod_base = cm
  modified_base 12: mod_base = OTHER; note = adenosine
  modified_base 13: mod_base = OTHER; note = guanosine
  modified_base 14: mod_base = OTHER; note = adenosine
  modified_base 15: mod_base = OTHER; note = guanosine
  modified_base 16: mod_base = OTHER; note = uridine
  modified_base 17: mod_base = OTHER; note = cytidine
  modified_base 18: mod_base = OTHER; note = cytidine
  modified_base 19: mod_base = OTHER; note = uridine
  modified_base 20: mod_base = OTHER; note = 2'-deoxythymidine
  modified_base 21: mod_base = OTHER; note = 2'-deoxythymidine
  source 1..21: mol_type = other RNA
ggtacatcttcagagtccttt

SEQ ID NO: 1632 - RNA, 21 nt, synthetic construct
  modified_base 20..21: mod_base = OTHER; note = thymine
  modified_base 1: mod_base = OTHER; note = adenosine
  modified_base 2: mod_base = OTHER; note = guanosine
  modified_base 3: mod_base = OTHER; note = guanosine
  modified_base 4: mod_base = um
  modified_base 5: mod_base = OTHER; note = adenosine
  modified_base 6: mod_base = cm
  modified_base 7: mod_base = OTHER; note = adenosine
  modified_base 8: mod_base = OTHER; note = uridine
  modified_base 9: mod_base = OTHER; note = cytidine
  modified_base 10: mod_base = OTHER; note = uridine
  modified_base 11: mod_base = OTHER; note = uridine
  modified_base 12: mod_base = cm
  modified_base 13: mod_base = OTHER; note = adenosine
  modified_base 14: mod_base = OTHER; note = guanosine
  modified_base 15: mod_base = OTHER; note = adenosine
  modified_base 16: mod_base = OTHER; note = guanosine
  modified_base 17: mod_base = OTHER; note = uridine
  modified_base 18: mod_base = OTHER; note = cytidine
  modified_base 19: mod_base = OTHER; note = cytidine
  modified_base 20: mod_base = OTHER; note = 2'-deoxythymidine
  modified_base 21: mod_base = OTHER; note = 2'-deoxythymidine
  source 1..21: mol_type = other RNA
aggtacatcttcagagtcctt

SEQ ID NO: 1633 - RNA, 21 nt, synthetic construct
  modified_base 20..21: mod_base = OTHER; note = thymine
  modified_base 1: mod_base = um
  modified_base 2: mod_base = OTHER; note = adenosine
  modified_base 3: mod_base = OTHER; note = guanosine
  modified_base 4: mod_base = OTHER; note = guanosine
  modified_base 5: mod_base = um
  modified_base 6: mod_base = OTHER; note = adenosine
  modified_base 7: mod_base = cm
  modified_base 8: mod_base = OTHER; note = adenosine
  modified_base 9: mod_base = OTHER; note = uridine
  modified_base 10: mod_base = OTHER; note = cytidine
  modified_base 11: mod_base = OTHER; note = uridine
  modified_base 12: mod_base = OTHER; note = uridine
  modified_base 13: mod_base = cm
  modified_base 14: mod_base = OTHER; note = adenosine
  modified_base 15: mod_base = OTHER; note = guanosine
  modified_base 16: mod_base = OTHER; note = adenosine
  modified_base 17: mod_base = OTHER; note = guanosine
  modified_base 18: mod_base = OTHER; note = uridine
  modified_base 19: mod_base = OTHER; note = cytidine
  modified_base 20: mod_base = OTHER; note = 2'-deoxythymidine
  modified_base 21: mod_base = OTHER; note = 2'-deoxythymidine
  source 1..21: mol_type = other RNA
taggtacatcttcagagtctt

SEQ ID NO: 1634 - RNA, 21 nt, synthetic construct
  modified_base 20..21: mod_base = OTHER; note = thymine
  modified_base 1: mod_base = OTHER; note = adenosine
  modified_base 2: mod_base = um
  modified_base 3: mod_base = OTHER; note = adenosine
  modified_base 4: mod_base = OTHER; note = guanosine
  modified_base 5: mod_base = OTHER; note = guanosine
  modified_base 6: mod_base = um
  modified_base 7: mod_base = OTHER; note = adenosine
  modified_base 8: mod_base = cm
  modified_base 9: mod_base = OTHER; note = adenosine
  modified_base 10: mod_base = OTHER; note = uridine
  modified_base 11: mod_base = OTHER; note = cytidine
  modified_base 12: mod_base = OTHER; note = uridine
  modified_base 13: mod_base = OTHER; note = uridine
  modified_base 14: mod_base = cm
  modified_base 15: mod_base = OTHER; note = adenosine
  modified_base 16: mod_base = OTHER; note = guanosine
  modified_base 17: mod_base = OTHER; note = adenosine
  modified_base 18: mod_base = OTHER; note = guanosine
  modified_base 19: mod_base = OTHER; note = uridine
  modified_base 20: mod_base = OTHER; note = 2'-deoxythymidine
  modified_base 21: mod_base = OTHER; note = 2'-deoxythymidine
  source 1..21: mol_type = other RNA
ataggtacatcttcagagttt

SEQ ID NO: 1635 - RNA, 21 nt, synthetic construct
  modified_base 20..21: mod_base = OTHER; note = thymine
  modified_base 1: mod_base = cm
  modified_base 2: mod_base = OTHER; note = adenosine
  modified_base 3: mod_base = um
  modified_base 4: mod_base = OTHER; note = adenosine
  modified_base 5: mod_base = OTHER; note = guanosine
  modified_base 6: mod_base = OTHER; note = guanosine
  modified_base 7: mod_base = um
  modified_base 8: mod_base = OTHER; note = adenosine
  modified_base 9: mod_base = cm
  modified_base 10: mod_base = OTHER; note = adenosine
  modified_base 11: mod_base = OTHER; note = uridine
  modified_base 12: mod_base = OTHER; note = cytidine
  modified_base 13: mod_base = OTHER; note = uridine
  modified_base 14: mod_base = OTHER; note = uridine
  modified_base 15: mod_base = cm
  modified_base 16: mod_base = OTHER; note = adenosine
  modified_base 17: mod_base = OTHER; note = guanosine
  modified_base 18: mod_base = OTHER; note = adenosine
  modified_base 19: mod_base = OTHER; note = guanosine
  modified_base 20: mod_base = OTHER; note = 2'-deoxythymidine
  modified_base 21: mod_base = OTHER; note = 2'-deoxythymidine
  source 1..21: mol_type = other RNA
cataggtacatcttcagagtt

SEQ ID NO: 1636 - RNA, 21 nt, synthetic construct
  modified_base 20..21: mod_base = OTHER; note = thymine
  modified_base 1: mod_base = OTHER; note = cytidine
  modified_base 2: mod_base = cm
  modified_base 3: mod_base = OTHER; note = adenosine
  modified_base 4: mod_base = um
  modified_base 5: mod_base = OTHER; note = adenosine
  modified_base 6: mod_base = OTHER; note = guanosine
  modified_base 7: mod_base = OTHER; note = guanosine
  modified_base 8: mod_base = um
  modified_base 9: mod_base = OTHER; note = adenosine
  modified_base 10: mod_base = cm
  modified_base 11: mod_base = OTHER; note = adenosine
  modified_base 12: mod_base = OTHER; note = uridine
  modified_base 13: mod_base = OTHER; note = cytidine
  modified_base 14: mod_base = OTHER; note = uridine
  modified_base 15: mod_base = OTHER; note = uridine
  modified_base 16: mod_base = cm
  modified_base 17: mod_base = OTHER; note = adenosine
  modified_base 18: mod_base = OTHER; note = guanosine
  modified_base 19: mod_base = OTHER; note = adenosine
  modified_base 20: mod_base = OTHER; note = 2'-deoxythymidine
  modified_base 21: mod_base = OTHER; note = 2'-deoxythymidine
  source 1..21: mol_type = other RNA
ccataggtacatcttcagatt

SEQ ID NO: 1637 - RNA, 21 nt, synthetic construct
  modified_base 20..21: mod_base = OTHER; note = thymine
  modified_base 1: mod_base = OTHER; note = adenosine
  modified_base 2: mod_base = OTHER; note = cytidine
  modified_base 3: mod_base = cm
  modified_base 4: mod_base = OTHER; note = adenosine
  modified_base 5: mod_base = um
  modified_base 6: mod_base = OTHER; note = adenosine
  modified_base 7: mod_base = OTHER; note = guanosine
  modified_base 8: mod_base = OTHER; note = guanosine
  modified_base 9: mod_base = um
  modified_base 10: mod_base = OTHER; note = adenosine
  modified_base 11: mod_base = cm
  modified_base 12: mod_base = OTHER; note = adenosine
  modified_base 13: mod_base = OTHER; note = uridine
  modified_base 14: mod_base = OTHER; note = cytidine
  modified_base 15: mod_base = OTHER; note = uridine
  modified_base 16: mod_base = OTHER; note = uridine
  modified_base 17: mod_base = cm
  modified_base 18: mod_base = OTHER; note = adenosine
  modified_base 19: mod_base = OTHER; note = guanosine
  modified_base 20: mod_base = OTHER; note = 2'-deoxythymidine
  modified_base 21: mod_base = OTHER; note = 2'-deoxythymidine
  source 1..21: mol_type = other RNA
accataggtacatcttcagtt

SEQ ID NO: 1638 - RNA, 21 nt, synthetic construct
  modified_base 20..21: mod_base = OTHER; note = thymine
  modified_base 1: mod_base = OTHER; note = guanosine
  modified_base 2: mod_base = OTHER; note = adenosine
  modified_base 3: mod_base = OTHER; note = cytidine
  modified_base 4: mod_base = cm
  modified_base 5: mod_base = OTHER; note = adenosine
  modified_base 6: mod_base = um
  modified_base 7: mod_base = OTHER; note = adenosine
  modified_base 8: mod_base = OTHER; note = guanosine
  modified_base 9: mod_base = OTHER; note = guanosine
  modified_base 10: mod_base = um
  modified_base 11: mod_base = OTHER; note = adenosine
  modified_base 12: mod_base = cm
  modified_base 13: mod_base = OTHER; note = adenosine
  modified_base 14: mod_base = OTHER; note = uridine
  modified_base 15: mod_base = OTHER; note = cytidine
  modified_base 16: mod_base = OTHER; note = uridine
  modified_base 17: mod_base = OTHER; note = uridine
  modified_base 18: mod_base = cm
  modified_base 19: mod_base = OTHER; note = adenosine
  modified_base 20: mod_base = OTHER; note = 2'-deoxythymidine
  modified_base 21: mod_base = OTHER; note = 2'-deoxythymidine
  source 1..21: mol_type = other RNA
gaccataggtacatcttcatt

SEQ ID NO: 1639 - RNA, 21 nt, synthetic construct
  modified_base 20..21: mod_base = OTHER; note = thymine
  modified_base 1: mod_base = OTHER; note = adenosine
  modified_base 2: mod_base = OTHER; note = adenosine
  modified_base 3: mod_base = OTHER; note = uridine
  modified_base 4: mod_base = cm
  modified_base 5: mod_base = OTHER; note = adenosine
  modified_base 6: mod_base = cm
  modified_base 7: mod_base = OTHER; note = adenosine
  modified_base 8: mod_base = OTHER; note = uridine
  modified_base 9: mod_base = OTHER; note = uridine
  modified_base 10: mod_base = um
  modified_base 11: mod_base = OTHER; note = adenosine
  modified_base 12: mod_base = OTHER; note = uridine
  modified_base 13: mod_base = OTHER; note = uridine
  modified_base 14: mod_base = OTHER; note = uridine
  modified_base 15: mod_base = OTHER; note = cytidine
  modified_base 16: mod_base = OTHER; note = cytidine
  modified_base 17: mod_base = um
  modified_base 18: mod_base = OTHER; note = adenosine
  modified_base 19: mod_base = OTHER; note = cytidine
  modified_base 20: mod_base = OTHER; note = 2'-deoxythymidine
  modified_base 21: mod_base = OTHER; note = 2'-deoxythymidine
  source 1..21: mol_type = other RNA
aatcacatttatttcctactt

SEQ ID NO: 1640 - RNA, 21 nt, synthetic construct
  modified_base 20..21: mod_base = OTHER; note = thymine
  modified_base 1: mod_base = OTHER; note = adenosine
  modified_base 2: mod_base = OTHER; note = adenosine
  modified_base 3: mod_base = OTHER; note = adenosine
  modified_base 4: mod_base = OTHER; note = uridine
  modified_base 5: mod_base = cm
  modified_base 6: mod_base = OTHER; note = adenosine
  modified_base 7: mod_base = cm
  modified_base 8: mod_base = OTHER; note = adenosine
  modified_base 9: mod_base = OTHER; note = uridine
  modified_base 10: mod_base = OTHER; note = uridine
  modified_base 11: mod_base = um
  modified_base 12: mod_base = OTHER; note = adenosine
  modified_base 13: mod_base = OTHER; note = uridine
  modified_base 14: mod_base = OTHER; note = uridine
  modified_base 15: mod_base = OTHER; note = uridine
  modified_base 16: mod_base = OTHER; note = cytidine
  modified_base 17: mod_base = OTHER; note = cytidine
  modified_base 18: mod_base = um
  modified_base 19: mod_base = OTHER; note = adenosine
  modified_base 20: mod_base = OTHER; note = 2'-deoxythymidine
  modified_base 21: mod_base = OTHER; note = 2'-deoxythymidine
  source 1..21: mol_type = other RNA
aaatcacatttatttcctatt

SEQ ID NO: 1641 - RNA, 21 nt, synthetic construct
  modified_base 20..21: mod_base = OTHER; note = thymine
  modified_base 1: mod_base = cm
  modified_base 2: mod_base = OTHER; note = adenosine
  modified_base 3: mod_base = OTHER; note = adenosine
  modified_base 4: mod_base = OTHER; note = adenosine
  modified_base 5: mod_base = OTHER; note = uridine
  modified_base 6: mod_base = cm
  modified_base 7: mod_base = OTHER; note = adenosine
  modified_base 8: mod_base = cm
  modified_base 9: mod_base = OTHER; note = adenosine
  modified_base 10: mod_base = OTHER; note = uridine
  modified_base 11: mod_base = OTHER; note = uridine
  modified_base 12: mod_base = um
  modified_base 13: mod_base = OTHER; note = adenosine
  modified_base 14: mod_base = OTHER; note = uridine
  modified_base 15: mod_base = OTHER; note = uridine
  modified_base 16: mod_base = OTHER; note = uridine
  modified_base 17: mod_base = OTHER; note = cytidine
  modified_base 18: mod_base = OTHER; note = cytidine
  modified_base 19: mod_base = OTHER; note = uridine
  modified_base 20: mod_base = OTHER; note = 2'-deoxythymidine
  modified_base 21: mod_base = OTHER; note = 2'-deoxythymidine
  source 1..21: mol_type = other RNA
caaatcacatttatttccttt

SEQ ID NO: 1642 - RNA, 21 nt, synthetic construct
  modified_base 20..21: mod_base = OTHER; note = thymine
  modified_base 1: mod_base = OTHER; note = guanosine
  modified_base 2: mod_base = cm
  modified_base 3: mod_base = OTHER; note = adenosine
  modified_base 4: mod_base = OTHER; note = adenosine
  modified_base 5: mod_base = OTHER; note = adenosine
  modified_base 6: mod_base = OTHER; note = uridine
  modified_base 7: mod_base = cm
  modified_base 8: mod_base = OTHER; note = adenosine
  modified_base 9: mod_base = cm
  modified_base 10: mod_base = OTHER; note = adenosine
  modified_base 11: mod_base = OTHER; note = uridine
  modified_base 12: mod_base = OTHER; note = uridine
  modified_base 13: mod_base = um
  modified_base 14: mod_base = OTHER; note = adenosine
  modified_base 15: mod_base = OTHER; note = uridine
  modified_base 16: mod_base = OTHER; note = uridine
  modified_base 17: mod_base = OTHER; note = uridine
  modified_base 18: mod_base = OTHER; note = cytidine
  modified_base 19: mod_base = OTHER; note = cytidine
  modified_base 20: mod_base = OTHER; note = 2'-deoxythymidine
  modified_base 21: mod_base = OTHER; note = 2'-deoxythymidine
  source 1..21: mol_type = other RNA
gcaaatcacatttatttcctt

SEQ ID NO: 1643 - RNA, 21 nt, synthetic construct
  modified_base 20..21: mod_base = OTHER; note = thymine
  modified_base 1: mod_base = OTHER; note = guanosine
  modified_base 2: mod_base = OTHER; note = guanosine
  modified_base 3: mod_base = cm
  modified_base 4: mod_base = OTHER; note = adenosine
  modified_base 5: mod_base = OTHER; note = adenosine
  modified_base 6: mod_base = OTHER; note = adenosine
  modified_base 7: mod_base = OTHER; note = uridine
  modified_base 8: mod_base = cm
  modified_base 9: mod_base = OTHER; note = adenosine
  modified_base 10: mod_base = cm
  modified_base 11: mod_base = OTHER; note = adenosine
  modified_base 12: mod_base = OTHER; note = uridine
  modified_base 13: mod_base = OTHER; note = uridine
  modified_base 14: mod_base = um
  modified_base 15: mod_base = OTHER; note = adenosine
  modified_base 16: mod_base = OTHER; note = uridine
  modified_base 17: mod_base = OTHER; note = uridine
  modified_base 18: mod_base = OTHER; note = uridine
  modified_base 19: mod_base = OTHER; note = cytidine
  modified_base 20: mod_base = OTHER; note = 2'-deoxythymidine
  modified_base 21: mod_base = OTHER; note = 2'-deoxythymidine
  source 1..21: mol_type = other RNA
ggcaaatcacatttatttctt

SEQ ID NO: 1644 - RNA, 21 nt, synthetic construct
  modified_base 20..21: mod_base = OTHER; note = thymine
  modified_base 1: mod_base = OTHER; note = adenosine
  modified_base 2: mod_base = OTHER; note = guanosine
  modified_base 3: mod_base = OTHER; note = guanosine
  modified_base 4: mod_base = cm
  modified_base 5: mod_base = OTHER; note = adenosine
  modified_base 6: mod_base = OTHER; note = adenosine
  modified_base 7: mod_base = OTHER; note = adenosine
  modified_base 8: mod_base = OTHER; note = uridine
  modified_base 9: mod_base = cm
  modified_base 10: mod_base = OTHER; note = adenosine
  modified_base 11: mod_base = cm
  modified_base 12: mod_base = OTHER; note = adenosine
  modified_base 13: mod_base = OTHER; note = uridine
  modified_base 14: mod_base = OTHER; note = uridine
  modified_base 15: mod_base = um
  modified_base 16: mod_base = OTHER; note = adenosine
  modified_base 17: mod_base = OTHER; note = uridine
  modified_base 18: mod_base = OTHER; note = uridine
  modified_base 19: mod_base = OTHER; note = uridine
  modified_base 20: mod_base = OTHER; note = 2'-deoxythymidine
  modified_base 21: mod_base = OTHER; note = 2'-deoxythymidine
  source 1..21: mol_type = other RNA
aggcaaatcacatttattttt

SEQ ID NO: 1645 - RNA, 21 nt, synthetic construct
  modified_base 20..21: mod_base = OTHER; note = thymine
  modified_base 1: mod_base = OTHER; note = adenosine
  modified_base 2: mod_base = OTHER; note = adenosine
  modified_base 3: mod_base = OTHER; note = guanosine
  modified_base 4: mod_base = OTHER; note = guanosine
  modified_base 5: mod_base = cm
  modified_base 6: mod_base = OTHER; note = adenosine
  modified_base 7: mod_base = OTHER; note = adenosine
  modified_base 8: mod_base = OTHER; note = adenosine
  modified_base 9: mod_base = OTHER; note = uridine
  modified_base 10: mod_base = cm
  modified_base 11: mod_base = OTHER; note = adenosine
  modified_base 12: mod_base = cm
  modified_base 13: mod_base = OTHER; note = adenosine
  modified_base 14: mod_base = OTHER; note = uridine
  modified_base 15: mod_base = OTHER; note = uridine
  modified_base 16: mod_base = um
  modified_base 17: mod_base = OTHER; note = adenosine
  modified_base 18: mod_base = OTHER; note = uridine
  modified_base 19: mod_base = OTHER; note = uridine
  modified_base 20: mod_base = OTHER; note = 2'-deoxythymidine
  modified_base 21: mod_base = OTHER; note = 2'-deoxythymidine
  source 1..21: mol_type = other RNA
aaggcaaatcacatttatttt

SEQ ID NO: 1646 - RNA, 21 nt, synthetic construct
  modified_base 20..21: mod_base = OTHER; note = thymine
  modified_base 1: mod_base = OTHER; note = guanosine
  modified_base 2: mod_base = OTHER; note = adenosine
  modified_base 3: mod_base = OTHER; note = adenosine
  modified_base 4: mod_base = OTHER; note = guanosine
  modified_base 5: mod_base = OTHER; note = guanosine
  modified_base 6: mod_base = cm
  modified_base 7: mod_base = OTHER; note = adenosine
  modified_base 8: mod_base = OTHER; note = adenosine
  modified_base 9: mod_base = OTHER; note = adenosine
  modified_base 10: mod_base = OTHER; note = uridine
  modified_base 11: mod_base = cm
  modified_base 12: mod_base = OTHER; note = adenosine
  modified_base 13: mod_base = cm
  modified_base 14: mod_base = OTHER; note = adenosine
  modified_base 15: mod_base = OTHER; note = uridine
  modified_base 16: mod_base = OTHER; note = uridine
  modified_base 17: mod_base = um
  modified_base 18: mod_base = OTHER; note = adenosine
  modified_base 19: mod_base = OTHER; note = uridine
  modified_base 20: mod_base = OTHER; note = 2'-deoxythymidine
  modified_base 21: mod_base = OTHER; note = 2'-deoxythymidine
  source 1..21: mol_type = other RNA
gaaggcaaatcacatttattt

SEQ ID NO: 1647 - RNA, 21 nt, synthetic construct
  modified_base 20..21: mod_base = OTHER; note = thymine
  modified_base 1: mod_base = OTHER; note = adenosine
  modified_base 2: mod_base = OTHER; note = guanosine
  modified_base 3: mod_base = OTHER; note = adenosine
  modified_base 4: mod_base = OTHER; note = adenosine
  modified_base 5: mod_base = OTHER; note = guanosine
  modified_base 6: mod_base = OTHER; note = guanosine
  modified_base 7: mod_base = cm
  modified_base 8: mod_base = OTHER; note = adenosine
  modified_base 9: mod_base = OTHER; note = adenosine
  modified_base 10: mod_base = OTHER; note = adenosine
  modified_base 11: mod_base = OTHER; note = uridine
  modified_base 12: mod_base = cm
  modified_base 13: mod_base = OTHER; note = adenosine
  modified_base 14: mod_base = cm
  modified_base 15: mod_base = OTHER; note = adenosine
  modified_base 16: mod_base = OTHER; note = uridine
  modified_base 17: mod_base = OTHER; note = uridine
  modified_base 18: mod_base = um
  modified_base 19: mod_base = OTHER; note = adenosine
  modified_base 20: mod_base = OTHER; note = 2'-deoxythymidine
  modified_base 21: mod_base = OTHER; note = 2'-deoxythymidine
  source 1..21: mol_type = other RNA
agaaggcaaatcacatttatt

SEQ ID NO: 1648 - RNA, 21 nt, synthetic construct
  modified_base 20..21: mod_base = OTHER; note = thymine
  modified_base 1: mod_base = um
  modified_base 2: mod_base = OTHER; note = adenosine
  modified_base 3: mod_base = OTHER; note = guanosine
  modified_base 4: mod_base = OTHER; note = adenosine
  modified_base 5: mod_base = OTHER; note = adenosine
  modified_base 6: mod_base = OTHER; note = guanosine
  modified_base 7: mod_base = OTHER; note = guanosine
  modified_base 8: mod_base = cm
  modified_base 9: mod_base = OTHER; note = adenosine
  modified_base 10: mod_base = OTHER; note = adenosine
  modified_base 11: mod_base = OTHER; note = adenosine
  modified_base 12: mod_base = OTHER; note = uridine
  modified_base 13: mod_base = cm
  modified_base 14: mod_base = OTHER; note = adenosine
  modified_base 15: mod_base = cm
  modified_base 16: mod_base = OTHER; note = adenosine
  modified_base 17: mod_base = OTHER; note = uridine
  modified_base 18: mod_base = OTHER; note = uridine
  modified_base 19: mod_base = OTHER; note = uridine
  modified_base 20: mod_base = OTHER; note = 2'-deoxythymidine
  modified_base 21: mod_base = OTHER; note = 2'-deoxythymidine
  source 1..21: mol_type = other RNA
tagaaggcaaatcacattttt

SEQ ID NO: 1649 - RNA, 21 nt, synthetic construct
  modified_base 20..21: mod_base = OTHER; note = thymine
  modified_base 1: mod_base = OTHER; note = cytidine
  modified_base 2: mod_base = um
  modified_base 3: mod_base = OTHER; note = adenosine
  modified_base 4: mod_base = OTHER; note = guanosine
  modified_base 5: mod_base = OTHER; note = adenosine
  modified_base 6: mod_base = OTHER; note = adenosine
  modified_base 7: mod_base = OTHER; note = guanosine
  modified_base 8: mod_base = OTHER; note = guanosine
  modified_base 9: mod_base = cm
  modified_base 10: mod_base = OTHER; note = adenosine
  modified_base 11: mod_base = OTHER; note = adenosine
  modified_base 12: mod_base = OTHER; note = adenosine
  modified_base 13: mod_base = OTHER; note = uridine
  modified_base 14: mod_base = cm
  modified_base 15: mod_base = OTHER; note = adenosine
  modified_base 16: mod_base = cm
  modified_base 17: mod_base = OTHER; note = adenosine
  modified_base 18: mod_base = OTHER; note = uridine
  modified_base 19: mod_base = OTHER; note = uridine
  modified_base 20: mod_base = OTHER; note = 2'-deoxythymidine
  modified_base 21: mod_base = OTHER; note = 2'-deoxythymidine
  source 1..21: mol_type = other RNA
ctagaaggcaaatcacatttt

SEQ ID NO: 1650 - RNA, 21 nt, synthetic construct
  modified_base 20..21: mod_base = OTHER; note = thymine
  modified_base 1: mod_base = OTHER; note = uridine
  modified_base 2: mod_base = OTHER; note = cytidine
  modified_base 3: mod_base = um
  modified_base 4: mod_base = OTHER; note = adenosine
  modified_base 5: mod_base = OTHER; note = guanosine
  modified_base 6: mod_base = OTHER; note = adenosine
  modified_base 7: mod_base = OTHER; note = adenosine
  modified_base 8: mod_base = OTHER; note = guanosine
  modified_base 9: mod_base = OTHER; note = guanosine
  modified_base 10: mod_base = cm
  modified_base 11: mod_base = OTHER; note = adenosine
  modified_base 12: mod_base = OTHER; note = adenosine
  modified_base 13: mod_base = OTHER; note = adenosine
  modified_base 14: mod_base = OTHER; note = uridine
  modified_base 15: mod_base = cm
  modified_base 16: mod_base = OTHER; note = adenosine
  modified_base 17: mod_base = cm
  modified_base 18: mod_base = OTHER; note = adenosine
  modified_base 19: mod_base = OTHER; note = uridine
  modified_base 20: mod_base = OTHER; note = 2'-deoxythymidine
  modified_base 21: mod_base = OTHER; note = 2'-deoxythymidine
  source 1..21: mol_type = other RNA
tctagaaggcaaatcacattt

SEQ ID NO: 1651 - RNA, 21 nt, synthetic construct
  modified_base 20..21: mod_base = OTHER; note = thymine
  modified_base 1: mod_base = OTHER; note = uridine
  modified_base 2: mod_base = OTHER; note = uridine
  modified_base 3: mod_base = OTHER; note = cytidine
  modified_base 4: mod_base = um
  modified_base 5: mod_base = OTHER; note = adenosine
  modified_base 6: mod_base = OTHER; note = guanosine
  modified_base 7: mod_base = OTHER; note = adenosine
  modified_base 8: mod_base = OTHER; note = adenosine
  modified_base 9: mod_base = OTHER; note = guanosine
  modified_base 10: mod_base = OTHER; note = guanosine
  modified_base 11: mod_base = cm
  modified_base 12: mod_base = OTHER; note = adenosine
  modified_base 13: mod_base = OTHER; note = adenosine
  modified_base 14: mod_base = OTHER; note = adenosine
  modified_base 15: mod_base = OTHER; note = uridine
  modified_base 16: mod_base = cm
  modified_base 17: mod_base = OTHER; note = adenosine
  modified_base 18: mod_base = cm
  modified_base 19: mod_base = OTHER; note = adenosine
  modified_base 20: mod_base = OTHER; note = 2'-deoxythymidine
  modified_base 21: mod_base = OTHER; note = 2'-deoxythymidine
  source 1..21: mol_type = other RNA
ttctagaaggcaaatcacatt

SEQ ID NO: 1652 - RNA, 21 nt, synthetic construct
  modified_base 20..21: mod_base = OTHER; note = thymine
  modified_base 1: mod_base = OTHER; note = guanosine
  modified_base 2: mod_base = OTHER; note = uridine
  modified_base 3: mod_base = OTHER; note = uridine
  modified_base 4: mod_base = OTHER; note = cytidine
  modified_base 5: mod_base = um
  modified_base 6: mod_base = OTHER; note = adenosine
  modified_base 7: mod_base = OTHER; note = guanosine
  modified_base 8: mod_base = OTHER; note = adenosine
  modified_base 9: mod_base = OTHER; note = adenosine
  modified_base 10: mod_base = OTHER; note = guanosine
  modified_base 11: mod_base = OTHER; note = guanosine
  modified_base 12: mod_base = cm
  modified_base 13: mod_base = OTHER; note = adenosine
  modified_base 14: mod_base = OTHER; note = adenosine
  modified_base 15: mod_base = OTHER; note = adenosine
  modified_base 16: mod_base = OTHER; note = uridine
  modified_base 17: mod_base = cm
  modified_base 18: mod_base = OTHER; note = adenosine
  modified_base 19: mod_base = OTHER; note = cytidine
  modified_base 20: mod_base = OTHER; note = 2'-deoxythymidine
  modified_base 21: mod_base = OTHER; note = 2'-deoxythymidine
  source 1..21: mol_type = other RNA
gttctagaaggcaaatcactt

SEQ ID NO: 1653 - RNA, 21 nt, synthetic construct
  modified_base 20..21: mod_base = OTHER; note = thymine
  modified_base 1: mod_base = OTHER; note = uridine
  modified_base 2: mod_base = OTHER; note = guanosine
  modified_base 3: mod_base = OTHER; note = uridine
  modified_base 4: mod_base = OTHER; note = uridine
  modified_base 5: mod_base = OTHER; note = cytidine
  modified_base 6: mod_base = um
  modified_base 7: mod_base = OTHER; note = adenosine
  modified_base 8: mod_base = OTHER; note = guanosine
  modified_base 9: mod_base = OTHER; note = adenosine
  modified_base 10: mod_base = OTHER; note = adenosine
  modified_base 11: mod_base = OTHER; note = guanosine
  modified_base 12: mod_base = OTHER; note = guanosine
  modified_base 13: mod_base = cm
  modified_base 14: mod_base = OTHER; note = adenosine
  modified_base 15: mod_base = OTHER; note = adenosine
  modified_base 16: mod_base = OTHER; note = adenosine
  modified_base 17: mod_base = OTHER; note = uridine
  modified_base 18: mod_base = cm
  modified_base 19: mod_base = OTHER; note = adenosine
  modified_base 20: mod_base = OTHER; note = 2'-deoxythymidine
  modified_base 21: mod_base = OTHER; note = 2'-deoxythymidine
  source 1..21: mol_type = other RNA
tgttctagaaggcaaatcatt

SEQ ID NO: 1654 - RNA, 21 nt, synthetic construct
  modified_base 20..21: mod_base = OTHER; note = thymine
  modified_base 1: mod_base = OTHER; note = cytidine
  modified_base 2: mod_base = OTHER; note = uridine
  modified_base 3: mod_base = OTHER; note = guanosine
  modified_base 4: mod_base = OTHER; note = uridine
  modified_base 5: mod_base = OTHER; note = uridine
  modified_base 6: mod_base = OTHER; note = cytidine
  modified_base 7: mod_base = um
  modified_base 8: mod_base = OTHER; note = adenosine
  modified_base 9: mod_base = OTHER; note = guanosine
  modified_base 10: mod_base = OTHER; note = adenosine
  modified_base 11: mod_base = OTHER; note = adenosine
  modified_base 12: mod_base = OTHER; note = guanosine
  modified_base 13: mod_base = OTHER; note = guanosine
  modified_base 14: mod_base = cm
  modified_base 15: mod_base = OTHER; note = adenosine
  modified_base 16: mod_base = OTHER; note = adenosine
  modified_base 17: mod_base = OTHER; note = adenosine
  modified_base 18: mod_base = OTHER; note = uridine
  modified_base 19: mod_base = OTHER; note = cytidine
  modified_base 20: mod_base = OTHER; note = 2'-deoxythymidine
  modified_base 21: mod_base = OTHER; note = 2'-deoxythymidine
  source 1..21: mol_type = other RNA
ctgttctagaaggcaaatctt

SEQ ID NO: 1655 - RNA, 21 nt, synthetic construct
  modified_base 20..21: mod_base = OTHER; note = thymine
  modified_base 1: mod_base = OTHER; note = adenosine
  modified_base 2: mod_base = OTHER; note = cytidine
  modified_base 3: mod_base = OTHER; note = uridine
  modified_base 4: mod_base = OTHER; note = guanosine
  modified_base 5: mod_base = OTHER; note = uridine
  modified_base 6: mod_base = OTHER; note = uridine
  modified_base 7: mod_base = OTHER; note = cytidine
  modified_base 8: mod_base = um
  modified_base 9: mod_base = OTHER; note = adenosine
  modified_base 10: mod_base = OTHER; note = guanosine
  modified_base 11: mod_base = OTHER; note = adenosine
  modified_base 12: mod_base = OTHER; note = adenosine
  modified_base 13: mod_base = OTHER; note = guanosine
  modified_base 14: mod_base = OTHER; note = guanosine
  modified_base 15: mod_base = cm
  modified_base 16: mod_base = OTHER; note = adenosine
  modified_base 17: mod_base = OTHER; note = adenosine
  modified_base 18: mod_base = OTHER; note = adenosine
  modified_base 19: mod_base = OTHER; note = uridine
  modified_base 20: mod_base = OTHER; note = 2'-deoxythymidine
  modified_base 21: mod_base = OTHER; note = 2'-deoxythymidine
  source 1..21: mol_type = other RNA
actgttctagaaggcaaattt

SEQ ID NO: 1656 - RNA, 21 nt, synthetic construct
  modified_base 20..21: mod_base = OTHER; note = thymine
  modified_base 1: mod_base = um
  modified_base 2: mod_base = OTHER; note = adenosine
  modified_base 3: mod_base = OTHER; note = cytidine
  modified_base 4: mod_base = OTHER; note = uridine
  modified_base 5: mod_base = OTHER; note = guanosine
  modified_base 6: mod_base = OTHER; note = uridine
  modified_base 7: mod_base = OTHER; note = uridine
  modified_base 8: mod_base = OTHER; note = cytidine
  modified_base 9: mod_base = um
  modified_base 10: mod_base = OTHER; note = adenosine
  modified_base 11: mod_base = OTHER; note = guanosine
  modified_base 12: mod_base = OTHER; note = adenosine
  modified_base 13: mod_base = OTHER; note = adenosine
  modified_base 14: mod_base = OTHER; note = guanosine
  modified_base 15: mod_base = OTHER; note = guanosine
  modified_base 16: mod_base = cm
  modified_base 17: mod_base = OTHER; note = adenosine
  modified_base 18: mod_base = OTHER; note = adenosine
  modified_base 19: mod_base = OTHER; note = adenosine
  modified_base 20: mod_base = OTHER; note = 2'-deoxythymidine
  modified_base 21: mod_base = OTHER; note = 2'-deoxythymidine
  source 1..21: mol_type = other RNA
tactgttctagaaggcaaatt

SEQ ID NO: 1657 - RNA, 21 nt, synthetic construct
  modified_base 20..21: mod_base = OTHER; note = thymine
  modified_base 1: mod_base = OTHER; note = uridine
  modified_base 2: mod_base = OTHER; note = cytidine
  modified_base 3: mod_base = um
  modified_base 4: mod_base = OTHER; note = adenosine
  modified_base 5: mod_base = OTHER; note = cytidine
  modified_base 6: mod_base = OTHER; note = uridine
  modified_base 7: mod_base = OTHER; note = guanosine
  modified_base 8: mod_base = OTHER; note = uridine
  modified_base 9: mod_base = OTHER; note = uridine
  modified_base 10: mod_base = OTHER; note = cytidine
  modified_base 11: mod_base = um
  modified_base 12: mod_base = OTHER; note = adenosine
  modified_base 13: mod_base = OTHER; note = guanosine
  modified_base 14: mod_base = OTHER; note = adenosine
  modified_base 15: mod_base = OTHER; note = adenosine
  modified_base 16: mod_base = OTHER; note = guanosine
  modified_base 17: mod_base = OTHER; note = guanosine
  modified_base 18: mod_base = cm
  modified_base 19: mod_base = OTHER; note = adenosine
  modified_base 20: mod_base = OTHER; note = 2'-deoxythymidine
  modified_base 21: mod_base = OTHER; note = 2'-deoxythymidine
  source 1..21: mol_type = other RNA
tctactgttctagaaggcatt

SEQ ID NO: 1658 - RNA, 21 nt, synthetic construct
  modified_base 20..21: mod_base = OTHER; note = thymine
  modified_base 1: mod_base = OTHER; note = guanosine
  modified_base 2: mod_base = OTHER; note = uridine
  modified_base 3: mod_base = OTHER; note = cytidine
  modified_base 4: mod_base = um
  modified_base 5: mod_base = OTHER; note = adenosine
  modified_base 6: mod_base = OTHER; note = cytidine
  modified_base 7: mod_base = OTHER; note = uridine
  modified_base 8: mod_base = OTHER; note = guanosine
  modified_base 9: mod_base = OTHER; note = uridine
  modified_base 10: mod_base = OTHER; note = uridine
  modified_base 11: mod_base = OTHER; note = cytidine
  modified_base 12: mod_base = um
  modified_base 13: mod_base = OTHER; note = adenosine
  modified_base 14: mod_base = OTHER; note = guanosine
  modified_base 15: mod_base = OTHER; note = adenosine
  modified_base 16: mod_base = OTHER; note = adenosine
  modified_base 17: mod_base = OTHER; note = guanosine
  modified_base 18: mod_base = OTHER; note = guanosine
  modified_base 19: mod_base = OTHER; note = cytidine
  modified_base 20: mod_base = OTHER; note = 2'-deoxythymidine
  modified_base 21: mod_base = OTHER; note = 2'-deoxythymidine
  source 1..21: mol_type = other RNA
gtctactgttctagaaggctt

SEQ ID NO: 1659 - RNA, 21 nt, synthetic construct
  modified_base 20..21: mod_base = OTHER; note = thymine
  modified_base 1: mod_base = OTHER; note = uridine
  modified_base 2: mod_base = OTHER; note = guanosine
  modified_base 3: mod_base = OTHER; note = uridine
  modified_base 4: mod_base = OTHER; note = cytidine
  modified_base 5: mod_base = um
  modified_base 6: mod_base = OTHER; note = adenosine
  modified_base 7: mod_base = OTHER; note = cytidine
  modified_base 8: mod_base = OTHER; note = uridine
  modified_base 9: mod_base = OTHER; note = guanosine
  modified_base 10: mod_base = OTHER; note = uridine
  modified_base 11: mod_base = OTHER; note = uridine
  modified_base 12: mod_base = OTHER; note = cytidine
  modified_base 13: mod_base = um
  modified_base 14: mod_base = OTHER; note = adenosine
  modified_base 15: mod_base = OTHER; note = guanosine
  modified_base 16: mod_base = OTHER; note = adenosine
  modified_base 17: mod_base = OTHER; note = adenosine
  modified_base 18: mod_base = OTHER; note = guanosine
  modified_base 19: mod_base = OTHER; note = guanosine
  modified_base 20: mod_base = OTHER; note = 2'-deoxythymidine
  modified_base 21: mod_base = OTHER; note = 2'-deoxythymidine
  source 1..21: mol_type = other RNA
tgtctactgttctagaaggtt

SEQ ID NO: 1660 - RNA, 21 nt, synthetic construct
  modified_base 20..21: mod_base = OTHER; note = thymine
  modified_base 1: mod_base = OTHER; note = guanosine
  modified_base 2: mod_base = OTHER; note = uridine
  modified_base 3: mod_base = OTHER; note = guanosine
  modified_base 4: mod_base = OTHER; note = uridine
  modified_base 5: mod_base = OTHER; note = cytidine
  modified_base 6: mod_base = um
  modified_base 7: mod_base = OTHER; note = adenosine
  modified_base 8: mod_base = OTHER; note = cytidine
  modified_base 9: mod_base = OTHER; note = uridine
  modified_base 10: mod_base = OTHER; note = guanosine
  modified_base 11: mod_base = OTHER; note = uridine
  modified_base 12: mod_base = OTHER; note = uridine
  modified_base 13: mod_base = OTHER; note = cytidine
  modified_base 14: mod_base = um
  modified_base 15: mod_base = OTHER; note = adenosine
  modified_base 16: mod_base = OTHER; note = guanosine
  modified_base 17: mod_base = OTHER; note = adenosine
  modified_base 18: mod_base = OTHER; note = adenosine
  modified_base 19: mod_base = OTHER; note = guanosine
  modified_base 20: mod_base = OTHER; note = 2'-deoxythymidine
  modified_base 21: mod_base = OTHER; note = 2'-deoxythymidine
  source 1..21: mol_type = other RNA
gtgtctactgttctagaagtt

SEQ ID NO: 1661 - RNA, 21 nt, synthetic construct
  modified_base 20..21: mod_base = OTHER; note = thymine
  modified_base 1: mod_base = OTHER; note = uridine
  modified_base 2: mod_base = OTHER; note = guanosine
  modified_base 3: mod_base = OTHER; note = uridine
  modified_base 4: mod_base = OTHER; note = guanosine
  modified_base 5: mod_base = OTHER; note = uridine
  modified_base 6: mod_base = OTHER; note = cytidine
  modified_base 7: mod_base = um
  modified_base 8: mod_base = OTHER; note = adenosine
  modified_base 9: mod_base = OTHER; note = cytidine
  modified_base 10: mod_base = OTHER; note = uridine
  modified_base 11: mod_base = OTHER; note = guanosine
  modified_base 12: mod_base = OTHER; note = uridine
  modified_base 13: mod_base = OTHER; note = uridine
  modified_base 14: mod_base = OTHER; note = cytidine
  modified_base 15: mod_base = um
  modified_base 16: mod_base = OTHER; note = adenosine
  modified_base 17: mod_base = OTHER; note = guanosine
  modified_base 18: mod_base = OTHER; note = adenosine
  modified_base 19: mod_base = OTHER; note = adenosine
  modified_base 20: mod_base = OTHER; note = 2'-deoxythymidine
  modified_base 21: mod_base = OTHER; note = 2'-deoxythymidine
  source 1..21: mol_type = other RNA
tgtgtctactgttctagaatt

SEQ ID NO: 1662 - RNA, 21 nt, synthetic construct
  modified_base 20..21: mod_base = OTHER; note = thymine
  modified_base 1: mod_base = OTHER; note = uridine
  modified_base 2: mod_base = OTHER; note = uridine
  modified_base 3: mod_base = OTHER; note = guanosine
  modified_base 4: mod_base = OTHER; note = uridine
  modified_base 5: mod_base = OTHER; note = guanosine
  modified_base 6: mod_base = OTHER; note = uridine
  modified_base 7: mod_base = OTHER; note = cytidine
  modified_base 8: mod_base = um
  modified_base 9: mod_base = OTHER; note = adenosine
  modified_base 10: mod_base = OTHER; note = cytidine
  modified_base 11: mod_base = OTHER; note = uridine
  modified_base 12: mod_base = OTHER; note = guanosine
  modified_base 13: mod_base = OTHER; note = uridine
  modified_base 14: mod_base = OTHER; note = uridine
  modified_base 15: mod_base = OTHER; note = cytidine
  modified_base 16: mod_base = um
  modified_base 17: mod_base = OTHER; note = adenosine
  modified_base 18: mod_base = OTHER; note = guanosine
  modified_base 19: mod_base = OTHER; note = adenosine
  modified_base 20: mod_base = OTHER; note = 2'-deoxythymidine
  modified_base 21: mod_base = OTHER; note = 2'-deoxythymidine
  source 1..21: mol_type = other RNA
ttgtgtctactgttctagatt

SEQ ID NO: 1663 - RNA, 21 nt, synthetic construct
  modified_base 20..21: mod_base = OTHER; note = thymine
  modified_base 1: mod_base = OTHER; note = uridine
  modified_base 2: mod_base = OTHER; note = uridine
  modified_base 3: mod_base = OTHER; note = uridine
  modified_base 4: mod_base = OTHER; note = guanosine
  modified_base 5: mod_base = OTHER; note = uridine
  modified_base 6: mod_base = OTHER; note = guanosine
  modified_base 7: mod_base = OTHER; note = uridine
  modified_base 8: mod_base = OTHER; note = cytidine
  modified_base 9: mod_base = um
  modified_base 10: mod_base = OTHER; note = adenosine
  modified_base 11: mod_base = OTHER; note = cytidine
  modified_base 12: mod_base = OTHER; note = uridine
  modified_base 13: mod_base = OTHER; note = guanosine
  modified_base 14: mod_base = OTHER; note = uridine
  modified_base 15: mod_base = OTHER; note = uridine
  modified_base 16: mod_base = OTHER; note = cytidine
  modified_base 17: mod_base = um
  modified_base 18: mod_base = OTHER; note = adenosine
  modified_base 19: mod_base = OTHER; note = guanosine
  modified_base 20: mod_base = OTHER; note = 2'-deoxythymidine
  modified_base 21: mod_base = OTHER; note = 2'-deoxythymidine
  source 1..21: mol_type = other RNA
tttgtgtctactgttctagtt

SEQ ID NO: 1664 - RNA, 21 nt, synthetic construct
  modified_base 20..21: mod_base = OTHER; note = thymine
  modified_base 1: mod_base = OTHER; note = uridine
  modified_base 2: mod_base = OTHER; note = uridine
  modified_base 3: mod_base = OTHER; note = uridine
  modified_base 4: mod_base = OTHER; note = uridine
  modified_base 5: mod_base = OTHER; note = guanosine
  modified_base 6: mod_base = OTHER; note = uridine
  modified_base 7: mod_base = OTHER; note = guanosine
  modified_base 8: mod_base = OTHER; note = uridine
  modified_base 9: mod_base = OTHER; note = cytidine
  modified_base 10: mod_base = um
  modified_base 11: mod_base = OTHER; note = adenosine
  modified_base 12: mod_base = OTHER; note = cytidine
  modified_base 13: mod_base = OTHER; note = uridine
  modified_base 14: mod_base = OTHER; note = guanosine
  modified_base 15: mod_base = OTHER; note = uridine
  modified_base 16: mod_base = OTHER; note = uridine
  modified_base 17: mod_base = OTHER; note = cytidine
  modified_base 18: mod_base = um
  modified_base 19: mod_base = OTHER; note = adenosine
  modified_base 20: mod_base = OTHER; note = 2'-deoxythymidine
  modified_base 21: mod_base = OTHER; note = 2'-deoxythymidine
  source 1..21: mol_type = other RNA
ttttgtgtctactgttctatt

SEQ ID NO: 1665 - RNA, 21 nt, synthetic construct
  modified_base 20..21: mod_base = OTHER; note = thymine
  modified_base 1: mod_base = OTHER; note = guanosine
  modified_base 2: mod_base = OTHER; note = uridine
  modified_base 3: mod_base = OTHER; note = uridine
  modified_base 4: mod_base = OTHER; note = uridine
  modified_base 5: mod_base = OTHER; note = uridine
  modified_base 6: mod_base = OTHER; note = guanosine
  modified_base 7: mod_base = OTHER; note = uridine
  modified_base 8: mod_base = OTHER; note = guanosine
  modified_base 9: mod_base = OTHER; note = uridine
  modified_base 10: mod_base = OTHER; note = cytidine
  modified_base 11: mod_base = um
  modified_base 12: mod_base = OTHER; note = adenosine
  modified_base 13: mod_base = OTHER; note = cytidine
  modified_base 14: mod_base = OTHER; note = uridine
  modified_base 15: mod_base = OTHER; note = guanosine
  modified_base 16: mod_base = OTHER; note = uridine
  modified_base 17: mod_base = OTHER; note = uridine
  modified_base 18: mod_base = OTHER; note = cytidine
  modified_base 19: mod_base = OTHER; note = uridine
  modified_base 20: mod_base = OTHER; note = 2'-deoxythymidine
  modified_base 21: mod_base = OTHER; note = 2'-deoxythymidine
  source 1..21: mol_type = other RNA
gttttgtgtctactgttcttt

SEQ ID NO: 1666 - RNA, 21 nt, synthetic construct
  modified_base 20..21: mod_base = OTHER; note = thymine
  modified_base 1: mod_base = OTHER; note = uridine
  modified_base 2: mod_base = OTHER; note = guanosine
  modified_base 3: mod_base = OTHER; note = uridine
  modified_base 4: mod_base = OTHER; note = uridine
  modified_base 5: mod_base = OTHER; note = uridine
  modified_base 6: mod_base = OTHER; note = uridine
  modified_base 7: mod_base = OTHER; note = guanosine
  modified_base 8: mod_base = OTHER; note = uridine
  modified_base 9: mod_base = OTHER; note = guanosine
  modified_base 10: mod_base = OTHER; note = uridine
  modified_base 11: mod_base = OTHER; note = cytidine
  modified_base 12: mod_base = um
  modified_base 13: mod_base = OTHER; note = adenosine
  modified_base 14: mod_base = OTHER; note = cytidine
  modified_base 15: mod_base = OTHER; note = uridine
  modified_base 16: mod_base = OTHER; note = guanosine
  modified_base 17: mod_base = OTHER; note = uridine
  modified_base 18: mod_base = OTHER; note = uridine
  modified_base 19: mod_base = OTHER; note = cytidine
  modified_base 20: mod_base = OTHER; note = 2'-deoxythymidine
  modified_base 21: mod_base = OTHER; note = 2'-deoxythymidine
  source 1..21: mol_type = other RNA
tgttttgtgtctactgttctt

SEQ ID NO: 1667 - RNA, 21 nt, synthetic construct
  modified_base 20..21: mod_base = OTHER; note = thymine
  modified_base 1: mod_base = OTHER; note = cytidine
  modified_base 2: mod_base = OTHER; note = uridine
  modified_base 3: mod_base = OTHER; note = guanosine
  modified_base 4: mod_base = OTHER; note = uridine
  modified_base 5: mod_base = OTHER; note = uridine
  modified_base 6: mod_base = OTHER; note = uridine
  modified_base 7: mod_base = OTHER; note = uridine
  modified_base 8: mod_base = OTHER; note = guanosine
  modified_base 9: mod_base = OTHER; note = uridine
  modified_base 10: mod_base = OTHER; note = guanosine
  modified_base 11: mod_base = OTHER; note = uridine
  modified_base 12: mod_base = OTHER; note = cytidine
  modified_base 13: mod_base = um
  modified_base 14: mod_base = OTHER; note = adenosine
  modified_base 15: mod_base = OTHER; note = cytidine
  modified_base 16: mod_base = OTHER; note = uridine
  modified_base 17: mod_base = OTHER; note = guanosine
  modified_base 18: mod_base = OTHER; note = uridine
  modified_base 19: mod_base = OTHER; note = uridine
  modified_base 20: mod_base = OTHER; note = 2'-deoxythymidine
  modified_base 21: mod_base = OTHER; note = 2'-deoxythymidine
  source 1..21: mol_type = other RNA
ctgttttgtgtctactgtttt

SEQ ID NO: 1668 - RNA, 21 nt, synthetic construct
  modified_base 20..21: mod_base = OTHER; note = thymine
  modified_base 1: mod_base = OTHER; note = cytidine
  modified_base 2: mod_base = OTHER; note = cytidine
  modified_base 3: mod_base = OTHER; note = uridine
  modified_base 4: mod_base = OTHER; note = guanosine
  modified_base 5: mod_base = OTHER; note = uridine
  modified_base 6: mod_base = OTHER; note = uridine
  modified_base 7: mod_base = OTHER; note = uridine
  modified_base 8: mod_base = OTHER; note = uridine
  modified_base 9: mod_base = OTHER; note = guanosine
  modified_base 10: mod_base = OTHER; note = uridine
  modified_base 11: mod_base = OTHER; note = guanosine
  modified_base 12: mod_base = OTHER; note = uridine
  modified_base 13: mod_base = OTHER; note = cytidine
  modified_base 14: mod_base = um
  modified_base 15: mod_base = OTHER; note = adenosine
  modified_base 16: mod_base = OTHER; note = cytidine
  modified_base 17: mod_base = OTHER; note = uridine
  modified_base 18: mod_base = OTHER; note = guanosine
  modified_base 19: mod_base = OTHER; note = uridine
  modified_base 20: mod_base = OTHER; note = 2'-deoxythymidine
  modified_base 21: mod_base = OTHER; note = 2'-deoxythymidine
  source 1..21: mol_type = other RNA
cctgttttgtgtctactgttt

SEQ ID NO: 1669 - RNA, 21 nt, synthetic construct
  modified_base 20..21: mod_base = OTHER; note = thymine
  modified_base 1: mod_base = OTHER; note = guanosine
  modified_base 2: mod_base = OTHER; note = cytidine
  modified_base 3: mod_base = OTHER; note = cytidine
  modified_base 4: mod_base = OTHER; note = uridine
  modified_base 5: mod_base = OTHER; note = guanosine
  modified_base 6: mod_base = OTHER; note = uridine
  modified_base 7: mod_base = OTHER; note = uridine
  modified_base 8: mod_base = OTHER; note = uridine
  modified_base 9: mod_base = OTHER; note = uridine
  modified_base 10: mod_base = OTHER; note = guanosine
  modified_base 11: mod_base = OTHER; note = uridine
  modified_base 12: mod_base = OTHER; note = guanosine
  modified_base 13: mod_base = OTHER; note = uridine
  modified_base 14: mod_base = OTHER; note = cytidine
  modified_base 15: mod_base = um
  modified_base 16: mod_base = OTHER; note = adenosine
  modified_base 17: mod_base = OTHER; note = cytidine
  modified_base 18: mod_base = OTHER; note = uridine
  modified_base 19: mod_base = OTHER; note = guanosine
  modified_base 20: mod_base = OTHER; note = 2'-deoxythymidine
  modified_base 21: mod_base = OTHER; note = 2'-deoxythymidine
  source 1..21: mol_type = other RNA
gcctgttttgtgtctactgtt

SEQ ID NO: 1670 - RNA, 21 nt, synthetic construct
  modified_base 20..21: mod_base = OTHER; note = thymine
  modified_base 1: mod_base = OTHER; note = adenosine
  modified_base 2: mod_base = OTHER; note = guanosine
  modified_base 3: mod_base = OTHER; note = cytidine
  modified_base 4: mod_base = OTHER; note = cytidine
  modified_base 5: mod_base = OTHER; note = uridine
  modified_base 6: mod_base = OTHER; note = guanosine
  modified_base 7: mod_base = OTHER; note = uridine
  modified_base 8: mod_base = OTHER; note = uridine
  modified_base 9: mod_base = OTHER; note = uridine
  modified_base 10: mod_base = OTHER; note = uridine
  modified_base 11: mod_base = OTHER; note = guanosine
  modified_base 12: mod_base = OTHER; note = uridine
  modified_base 13: mod_base = OTHER; note = guanosine
  modified_base 14: mod_base = OTHER; note = uridine
  modified_base 15: mod_base = OTHER; note = cytidine
  modified_base 16: mod_base = um
  modified_base 17: mod_base = OTHER; note = adenosine
  modified_base 18: mod_base = OTHER; note = cytidine
  modified_base 19: mod_base = OTHER; note = uridine
  modified_base 20: mod_base = OTHER; note = 2'-deoxythymidine
  modified_base 21: mod_base = OTHER; note = 2'-deoxythymidine
  source 1..21: mol_type = other RNA
agcctgttttgtgtctacttt

SEQ ID NO: 1671 - RNA, 21 nt, synthetic construct
  modified_base 20..21: mod_base = OTHER; note = thymine
  modified_base 1: mod_base = OTHER; note = guanosine
  modified_base 2: mod_base = OTHER; note = adenosine
  modified_base 3: mod_base = OTHER; note = guanosine
  modified_base 4: mod_base = OTHER; note = cytidine
  modified_base 5: mod_base = OTHER; note = cytidine
  modified_base 6: mod_base = OTHER; note = uridine
  modified_base 7: mod_base = OTHER; note = guanosine
  modified_base 8: mod_base = OTHER; note = uridine
  modified_base 9: mod_base = OTHER; note = uridine
  modified_base 10: mod_base = OTHER; note = uridine
  modified_base 11: mod_base = OTHER; note = uridine
  modified_base 12: mod_base = OTHER; note = guanosine
  modified_base 13: mod_base = OTHER; note = uridine
  modified_base 14: mod_base = OTHER; note = guanosine
  modified_base 15: mod_base = OTHER; note = uridine
  modified_base 16: mod_base = OTHER; note = cytidine
  modified_base 17: mod_base = um
  modified_base 18: mod_base = OTHER; note = adenosine
  modified_base 19: mod_base = OTHER; note = cytidine
  modified_base 20: mod_base = OTHER; note = 2'-deoxythymidine
  modified_base 21: mod_base = OTHER; note = 2'-deoxythymidine
  source 1..21: mol_type = other RNA
gagcctgttttgtgtctactt

SEQ ID NO: 1672 - RNA, 21 nt, synthetic construct
  modified_base 20..21: mod_base = OTHER; note = thymine
  modified_base 1: mod_base = OTHER; note = uridine
  modified_base 2: mod_base = OTHER; note = guanosine
  modified_base 3: mod_base = OTHER; note = adenosine
  modified_base 4: mod_base = OTHER; note = guanosine
  modified_base 5: mod_base = OTHER; note = cytidine
  modified_base 6: mod_base = OTHER; note = cytidine
  modified_base 7: mod_base = OTHER; note = uridine
  modified_base 8: mod_base = OTHER; note = guanosine
  modified_base 9: mod_base = OTHER; note = uridine
  modified_base 10: mod_base = OTHER; note = uridine
  modified_base 11: mod_base = OTHER; note = uridine
  modified_base 12: mod_base = OTHER; note = uridine
  modified_base 13: mod_base = OTHER; note = guanosine
  modified_base 14: mod_base = OTHER; note = uridine
  modified_base 15: mod_base = OTHER; note = guanosine
  modified_base 16: mod_base = OTHER; note = uridine
  modified_base 17: mod_base = OTHER; note = cytidine
  modified_base 18: mod_base = um
  modified_base 19: mod_base = OTHER; note = adenosine
  modified_base 20: mod_base = OTHER; note = 2'-deoxythymidine
  modified_base 21: mod_base = OTHER; note = 2'-deoxythymidine
  source 1..21: mol_type = other RNA
tgagcctgttttgtgtctatt

SEQ ID NO: 1673 - DNA, 21 bp, synthetic construct
  modified_base 1: mod_base = OTHER; note = cytidine
  modified_base 2: mod_base = OTHER; note = uridine
  modified_base 3: mod_base = OTHER; note = guanosine
  modified_base 4: mod_base = OTHER; note = adenosine
  modified_base 5: mod_base = OTHER; note = guanosine
  modified_base 6: mod_base = OTHER; note = cytidine
  modified_base 7: mod_base = OTHER; note = cytidine
  modified_base 8: mod_base = OTHER; note = uridine
  modified_base 9: mod_base = OTHER; note = guanosine
  modified_base 10: mod_base = OTHER; note = uridine
  modified_base 11: mod_base = OTHER; note = uridine
  modified_base 12: mod_base = OTHER; note = uridine
  modified_base 13: mod_base = OTHER; note = uridine
  modified_base 14: mod_base = OTHER; note = guanosine
  modified_base 15: mod_base = OTHER; note = uridine
  modified_base 16: mod_base = OTHER; note = guanosine
  modified_base 17: mod_base = OTHER; note = uridine
  modified_base 18: mod_base = OTHER; note = cytidine
  modified_base 19: mod_base = OTHER; note = uridine
  modified_base 20: mod_base = OTHER; note = 2'-deoxythymidine
  modified_base 21: mod_base = OTHER; note = 2'-deoxythymidine
  source 1..21: mol_type = other DNA
ctgagcctgttttgtgtcttt

SEQ ID NO: 1674 - DNA, 21 bp, synthetic construct
  modified_base 1: mod_base = OTHER; note = cytidine
  modified_base 2: mod_base = OTHER; note = cytidine
  modified_base 3: mod_base = OTHER; note = uridine
  modified_base 4: mod_base = OTHER; note = guanosine
  modified_base 5: mod_base = OTHER; note = adenosine
  modified_base 6: mod_base = OTHER; note = guanosine
  modified_base 7: mod_base = OTHER; note = cytidine
  modified_base 8: mod_base = OTHER; note = cytidine
  modified_base 9: mod_base = OTHER; note = uridine
  modified_base 10: mod_base = OTHER; note = guanosine
  modified_base 11: mod_base = OTHER; note = uridine
  modified_base 12: mod_base = OTHER; note = uridine
  modified_base 13: mod_base = OTHER; note = uridine
  modified_base 14: mod_base = OTHER; note = uridine
  modified_base 15: mod_base = OTHER; note = guanosine
  modified_base 16: mod_base = OTHER; note = uridine
  modified_base 17: mod_base = OTHER; note = guanosine
  modified_base 18: mod_base = OTHER; note = uridine
  modified_base 19: mod_base = OTHER; note = cytidine
  modified_base 20: mod_base = OTHER; note = 2'-deoxythymidine
  modified_base 21: mod_base = OTHER; note = 2'-deoxythymidine
  source 1..21: mol_type = other DNA
cctgagcctgttttgtgtctt

SEQ ID NO: 1675 - DNA, 21 bp, synthetic construct
  modified_base 1: mod_base = OTHER; note = uridine
  modified_base 2: mod_base = OTHER; note = cytidine
  modified_base 3: mod_base = OTHER; note = cytidine
  modified_base 4: mod_base = OTHER; note = uridine
  modified_base 5: mod_base = OTHER; note = guanosine
  modified_base 6: mod_base = OTHER; note = adenosine
  modified_base 7: mod_base = OTHER; note = guanosine
  modified_base 8: mod_base = OTHER; note = cytidine
  modified_base 9: mod_base = OTHER; note = cytidine
  modified_base 10: mod_base = OTHER; note = uridine
  modified_base 11: mod_base = OTHER; note = guanosine
  modified_base 12: mod_base = OTHER; note = uridine
  modified_base 13: mod_base = OTHER; note = uridine
  modified_base 14: mod_base = OTHER; note = uridine
  modified_base 15: mod_base = OTHER; note = uridine
  modified_base 16: mod_base = OTHER; note = guanosine
  modified_base 17: mod_base = OTHER; note = uridine
  modified_base 18: mod_base = OTHER; note = guanosine
  modified_base 19: mod_base = OTHER; note = uridine
  modified_base 20: mod_base = OTHER; note = 2'-deoxythymidine
  modified_base 21: mod_base = OTHER; note = 2'-deoxythymidine
  source 1..21: mol_type = other DNA
tcctgagcctgttttgtgttt

SEQ ID NO: 1676 - DNA, 21 bp, synthetic construct
  modified_base 1: mod_base = OTHER; note = guanosine
  modified_base 2: mod_base = OTHER; note = uridine
  modified_base 3: mod_base = OTHER; note = cytidine
  modified_base 4: mod_base = OTHER; note = cytidine
  modified_base 5: mod_base = OTHER; note = uridine
  modified_base 6: mod_base = OTHER; note = guanosine
  modified_base 7: mod_base = OTHER; note = adenosine
  modified_base 8: mod_base = OTHER; note = guanosine
  modified_base 9: mod_base = OTHER; note = cytidine
  modified_base 10: mod_base = OTHER; note = cytidine
  modified_base 11: mod_base = OTHER; note = uridine
  modified_base 12: mod_base = OTHER; note = guanosine
  modified_base 13: mod_base = OTHER; note = uridine
  modified_base 14: mod_base = OTHER; note = uridine
  modified_base 15: mod_base = OTHER; note = uridine
  modified_base 16: mod_base = OTHER; note = uridine
  modified_base 17: mod_base = OTHER; note = guanosine
  modified_base 18: mod_base = OTHER; note = uridine
  modified_base 19: mod_base = OTHER; note = guanosine
  modified_base 20: mod_base = OTHER; note = 2'-deoxythymidine
  modified_base 21: mod_base = OTHER; note = 2'-deoxythymidine
  source 1..21: mol_type = other DNA
gtcctgagcctgttttgtgtt

SEQ ID NO: 1677 - DNA, 21 bp, synthetic construct
  modified_base 1: mod_base = OTHER; note = adenosine
  modified_base 2: mod_base = OTHER; note = guanosine
  modified_base 3: mod_base = OTHER; note = uridine
  modified_base 4: mod_base = OTHER; note = cytidine
  modified_base 5: mod_base = OTHER; note = cytidine
  modified_base 6: mod_base = OTHER; note = uridine
  modified_base 7: mod_base = OTHER; note = guanosine
  modified_base 8: mod_base = OTHER; note = adenosine
  modified_base 9: mod_base = OTHER; note = guanosine
  modified_base 10: mod_base = OTHER; note = cytidine
  modified_base 11: mod_base = OTHER; note = cytidine
  modified_base 12: mod_base = OTHER; note = uridine
  modified_base 13: mod_base = OTHER; note = guanosine
  modified_base 14: mod_base = OTHER; note = uridine
  modified_base 15: mod_base = OTHER; note = uridine
  modified_base 16: mod_base = OTHER; note = uridine
  modified_base 17: mod_base = OTHER; note = uridine
  modified_base 18: mod_base = OTHER; note = guanosine
  modified_base 19: mod_base = OTHER; note = uridine
  modified_base 20: mod_base = OTHER; note = 2'-deoxythymidine
  modified_base 21: mod_base = OTHER; note = 2'-deoxythymidine
  source 1..21: mol_type = other DNA
agtcctgagcctgttttgttt

SEQ ID NO: 1678 - DNA, 21 bp, synthetic construct
  modified_base 1: mod_base = OTHER; note = adenosine
  modified_base 2: mod_base = OTHER; note = adenosine
  modified_base 3: mod_base = OTHER; note = guanosine
  modified_base 4: mod_base = OTHER; note = uridine
  modified_base 5: mod_base = OTHER; note = cytidine
  modified_base 6: mod_base = OTHER; note = cytidine
  modified_base 7: mod_base = OTHER; note = uridine
  modified_base 8: mod_base = OTHER; note = guanosine
  modified_base 9: mod_base = OTHER; note = adenosine
  modified_base 10: mod_base = OTHER; note = guanosine
  modified_base 11: mod_base = OTHER; note = cytidine
  modified_base 12: mod_base = OTHER; note = cytidine
  modified_base 13: mod_base = OTHER; note = uridine
  modified_base 14: mod_base = OTHER; note = guanosine
  modified_base 15: mod_base = OTHER; note = uridine
  modified_base 16: mod_base = OTHER; note = uridine
  modified_base 17: mod_base = OTHER; note = uridine
  modified_base 18: mod_base = OTHER; note = uridine
  modified_base 19: mod_base = OTHER; note = guanosine
  modified_base 20: mod_base = OTHER; note = 2'-deoxythymidine
  modified_base 21: mod_base = OTHER; note = 2'-deoxythymidine
  source 1..21: mol_type = other DNA
aagtcctgagcctgttttgtt

SEQ ID NO: 1679 - RNA, 21 nt, synthetic construct
  modified_base 20..21: mod_base = OTHER; note = thymine
  modified_base 1: mod_base = um
  modified_base 2: mod_base = OTHER; note = adenosine
  modified_base 3: mod_base = OTHER; note = adenosine
  modified_base 4: mod_base = OTHER; note = guanosine
  modified_base 5: mod_base = OTHER; note = uridine
  modified_base 6: mod_base = OTHER; note = cytidine
  modified_base 7: mod_base = OTHER; note = cytidine
  modified_base 8: mod_base = OTHER; note = uridine
  modified_base 9: mod_base = OTHER; note = guanosine
  modified_base 10: mod_base = OTHER; note = adenosine
  modified_base 11: mod_base = OTHER; note = guanosine
  modified_base 12: mod_base = OTHER; note = cytidine
  modified_base 13: mod_base = OTHER; note = cytidine
  modified_base 14: mod_base = OTHER; note = uridine
  modified_base 15: mod_base = OTHER; note = guanosine
  modified_base 16: mod_base = OTHER; note = uridine
  modified_base 17: mod_base = OTHER; note = uridine
  modified_base 18: mod_base = OTHER; note = uridine
  modified_base 19: mod_base = OTHER; note = uridine
  modified_base 20: mod_base = OTHER; note = 2'-deoxythymidine
  modified_base 21: mod_base = OTHER; note = 2'-deoxythymidine
  source 1..21: mol_type = other RNA
taagtcctgagcctgtttttt

SEQ ID NO: 1680 - RNA, 21 nt, synthetic construct
  modified_base 20..21: mod_base = OTHER; note = thymine
  modified_base 1: mod_base = OTHER; note = cytidine
  modified_base 2: mod_base = um
  modified_base 3: mod_base = OTHER; note = adenosine
  modified_base 4: mod_base = OTHER; note = adenosine
  modified_base 5: mod_base = OTHER; note = guanosine
  modified_base 6: mod_base = OTHER; note = uridine
  modified_base 7: mod_base = OTHER; note = cytidine
  modified_base 8: mod_base = OTHER; note = cytidine
  modified_base 9: mod_base = OTHER; note = uridine
  modified_base 10: mod_base = OTHER; note = guanosine
  modified_base 11: mod_base = OTHER; note = adenosine
  modified_base 12: mod_base = OTHER; note = guanosine
  modified_base 13: mod_base = OTHER; note = cytidine
  modified_base 14: mod_base = OTHER; note = cytidine
  modified_base 15: mod_base = OTHER; note = uridine
  modified_base 16: mod_base = OTHER; note = guanosine
  modified_base 17: mod_base = OTHER; note = uridine
  modified_base 18: mod_base = OTHER; note = uridine
  modified_base 19: mod_base = OTHER; note = uridine
  modified_base 20: mod_base = OTHER; note = 2'-deoxythymidine
  modified_base 21: mod_base = OTHER; note = 2'-deoxythymidine
  source 1..21: mol_type = other RNA
ctaagtcctgagcctgttttt

SEQ ID NO: 1681 - RNA, 21 nt, synthetic construct
  modified_base 20..21: mod_base = OTHER; note = thymine
  modified_base 1: mod_base = OTHER; note = guanosine
  modified_base 2: mod_base = OTHER; note = cytidine
  modified_base 3: mod_base = um
  modified_base 4: mod_base = OTHER; note = adenosine
  modified_base 5: mod_base = OTHER; note = adenosine
  modified_base 6: mod_base = OTHER; note = guanosine
  modified_base 7: mod_base = OTHER; note = uridine
  modified_base 8: mod_base = OTHER; note = cytidine
  modified_base 9: mod_base = OTHER; note = cytidine
  modified_base 10: mod_base = OTHER; note = uridine
  modified_base 11: mod_base = OTHER; note = guanosine
  modified_base 12: mod_base = OTHER; note = adenosine
  modified_base 13: mod_base = OTHER; note = guanosine
  modified_base 14: mod_base = OTHER; note = cytidine
  modified_base 15: mod_base = OTHER; note = cytidine
  modified_base 16: mod_base = OTHER; note = uridine
  modified_base 17: mod_base = OTHER; note = guanosine
  modified_base 18: mod_base = OTHER; note = uridine
  modified_base 19: mod_base = OTHER; note = uridine
  modified_base 20: mod_base = OTHER; note = 2'-deoxythymidine
  modified_base 21: mod_base = OTHER; note = 2'-deoxythymidine
  source 1..21: mol_type = other RNA
gctaagtcctgagcctgtttt

SEQ ID NO: 1682 - RNA, 21 nt, synthetic construct
  modified_base 20..21: mod_base = OTHER; note = thymine
  modified_base 1: mod_base = OTHER; note = uridine
  modified_base 2: mod_base = OTHER; note = guanosine
  modified_base 3: mod_base = OTHER; note = cytidine
  modified_base 4: mod_base = um
  modified_base 5: mod_base = OTHER; note = adenosine
  modified_base 6: mod_base = OTHER; note = adenosine
  modified_base 7: mod_base = OTHER; note = guanosine
  modified_base 8: mod_base = OTHER; note = uridine
  modified_base 9: mod_base = OTHER; note = cytidine
  modified_base 10: mod_base = OTHER; note = cytidine
  modified_base 11: mod_base = OTHER; note = uridine
  modified_base 12: mod_base = OTHER; note = guanosine
  modified_base 13: mod_base = OTHER; note = adenosine
  modified_base 14: mod_base = OTHER; note = guanosine
  modified_base 15: mod_base = OTHER; note = cytidine
  modified_base 16: mod_base = OTHER; note = cytidine
  modified_base 17: mod_base = OTHER; note = uridine
  modified_base 18: mod_base = OTHER; note = guanosine
  modified_base 19: mod_base = OTHER; note = uridine
  modified_base 20: mod_base = OTHER; note = 2'-deoxythymidine
  modified_base 21: mod_base = OTHER; note = 2'-deoxythymidine
  source 1..21: mol_type = other RNA
tgctaagtcctgagcctgttt

SEQ ID NO: 1683 - RNA, 21 nt, synthetic construct
  modified_base 20..21: mod_base = OTHER; note = thymine
  modified_base 1: mod_base = OTHER; note = uridine
  modified_base 2: mod_base = OTHER; note = uridine
  modified_base 3: mod_base = OTHER; note = guanosine
  modified_base 4: mod_base = OTHER; note = cytidine
  modified_base 5: mod_base = um
  modified_base 6: mod_base = OTHER; note = adenosine
  modified_base 7: mod_base = OTHER; note = adenosine
  modified_base 8: mod_base = OTHER; note = guanosine
  modified_base 9: mod_base = OTHER; note = uridine
  modified_base 10: mod_base = OTHER; note = cytidine
  modified_base 11: mod_base = OTHER; note = cytidine
  modified_base 12: mod_base = OTHER; note = uridine
  modified_base 13: mod_base = OTHER; note = guanosine
  modified_base 14: mod_base = OTHER; note = adenosine
  modified_base 15: mod_base = OTHER; note = guanosine
  modified_base 16: mod_base = OTHER; note = cytidine
  modified_base 17: mod_base = OTHER; note = cytidine
  modified_base 18: mod_base = OTHER; note = uridine
  modified_base 19: mod_base = OTHER; note = guanosine
  modified_base 20: mod_base = OTHER; note = 2'-deoxythymidine
  modified_base 21: mod_base = OTHER; note = 2'-deoxythymidine
  source 1..21: mol_type = other RNA
ttgctaagtcctgagcctgtt

SEQ ID NO: 1684 - RNA, 21 nt, synthetic construct
  modified_base 20..21: mod_base = OTHER; note = thymine
  modified_base 1: mod_base = OTHER; note = cytidine
  modified_base 2: mod_base = OTHER; note = uridine
  modified_base 3: mod_base = OTHER; note = uridine
  modified_base 4: mod_base = OTHER; note = guanosine
  modified_base 5: mod_base = OTHER; note = cytidine
  modified_base 6: mod_base = um
  modified_base 7: mod_base = OTHER; note = adenosine
  modified_base 8: mod_base = OTHER; note = adenosine
  modified_base 9: mod_base = OTHER; note = guanosine
  modified_base 10: mod_base = OTHER; note = uridine
  modified_base 11: mod_base = OTHER; note = cytidine
  modified_base 12: mod_base = OTHER; note = cytidine
  modified_base 13: mod_base = OTHER; note = uridine
  modified_base 14: mod_base = OTHER; note = guanosine
  modified_base 15: mod_base = OTHER; note = adenosine
  modified_base 16: mod_base = OTHER; note = guanosine
  modified_base 17: mod_base = OTHER; note = cytidine
  modified_base 18: mod_base = OTHER; note = cytidine
  modified_base 19: mod_base = OTHER; note = uridine
  modified_base 20: mod_base = OTHER; note = 2'-deoxythymidine
  modified_base 21: mod_base = OTHER; note = 2'-deoxythymidine
  source 1..21: mol_type = other RNA
cttgctaagtcctgagccttt

SEQ ID NO: 1685 - RNA, 21 nt, synthetic construct
  modified_base 20..21: mod_base = OTHER; note = thymine
  modified_base 1: mod_base = OTHER; note = uridine
  modified_base 2: mod_base = OTHER; note = cytidine
  modified_base 3: mod_base = OTHER; note = uridine
  modified_base 4: mod_base = OTHER; note = uridine
  modified_base 5: mod_base = OTHER; note = guanosine
  modified_base 6: mod_base = OTHER; note = cytidine
  modified_base 7: mod_base = um
  modified_base 8: mod_base = OTHER; note = adenosine
  modified_base 9: mod_base = OTHER; note = adenosine
  modified_base 10: mod_base = OTHER; note = guanosine
  modified_base 11: mod_base = OTHER; note = uridine
  modified_base 12: mod_base = OTHER; note = cytidine
  modified_base 13: mod_base = OTHER; note = cytidine
  modified_base 14: mod_base = OTHER; note = uridine
  modified_base 15: mod_base = OTHER; note = guanosine
  modified_base 16: mod_base = OTHER; note = adenosine
  modified_base 17: mod_base = OTHER; note = guanosine
  modified_base 18: mod_base = OTHER; note = cytidine
  modified_base 19: mod_base = OTHER; note = cytidine
  modified_base 20: mod_base = OTHER; note = 2'-deoxythymidine
  modified_base 21: mod_base = OTHER; note = 2'-deoxythymidine
  source 1..21: mol_type = other RNA
tcttgctaagtcctgagcctt

SEQ ID NO: 1686 - RNA, 21 nt, synthetic construct
  modified_base 20..21: mod_base = OTHER; note = thymine
  modified_base 1: mod_base = OTHER; note = uridine
  modified_base 2: mod_base = OTHER; note = uridine
  modified_base 3: mod_base = OTHER; note = cytidine
  modified_base 4: mod_base = OTHER; note = uridine
  modified_base 5: mod_base = OTHER; note = uridine
  modified_base 6: mod_base = OTHER; note = guanosine
  modified_base 7: mod_base = OTHER; note = cytidine
  modified_base 8: mod_base = um
  modified_base 9: mod_base = OTHER; note = adenosine
  modified_base 10: mod_base = OTHER; note = adenosine
  modified_base 11: mod_base = OTHER; note = guanosine
  modified_base 12: mod_base = OTHER; note = uridine
  modified_base 13: mod_base = OTHER; note = cytidine
  modified_base 14: mod_base = OTHER; note = cytidine
  modified_base 15: mod_base = OTHER; note = uridine
  modified_base 16: mod_base = OTHER; note = guanosine
  modified_base 17: mod_base = OTHER; note = adenosine
  modified_base 18: mod_base = OTHER; note = guanosine
  modified_base 19: mod_base = OTHER; note = cytidine
  modified_base 20: mod_base = OTHER; note = 2'-deoxythymidine
  modified_base 21: mod_base = OTHER; note = 2'-deoxythymidine
  source 1..21: mol_type = other RNA
ttcttgctaagtcctgagctt

SEQ ID NO: 1687 - RNA, 21 nt, synthetic construct
  modified_base 20..21: mod_base = OTHER; note = thymine
  modified_base 1: mod_base = OTHER; note = cytidine
  modified_base 2: mod_base = OTHER; note = uridine
  modified_base 3: mod_base = OTHER; note = uridine
  modified_base 4: mod_base = OTHER; note = cytidine
  modified_base 5: mod_base = OTHER; note = uridine
  modified_base 6: mod_base = OTHER; note = uridine
  modified_base 7: mod_base = OTHER; note = guanosine
  modified_base 8: mod_base = OTHER; note = cytidine
  modified_base 9: mod_base = um
  modified_base 10: mod_base = OTHER; note = adenosine
  modified_base 11: mod_base = OTHER; note = adenosine
  modified_base 12: mod_base = OTHER; note = guanosine
  modified_base 13: mod_base = OTHER; note = uridine
  modified_base 14: mod_base = OTHER; note = cytidine
  modified_base 15: mod_base = OTHER; note = cytidine
  modified_base 16: mod_base = OTHER; note = uridine
  modified_base 17: mod_base = OTHER; note = guanosine
  modified_base 18: mod_base = OTHER; note = adenosine
  modified_base 19: mod_base = OTHER; note = guanosine
  modified_base 20: mod_base = OTHER; note = 2'-deoxythymidine
  modified_base 21: mod_base = OTHER; note = 2'-deoxythymidine
  source 1..21: mol_type = other RNA
cttcttgctaagtcctgagtt

SEQ ID NO: 1688 - RNA, 21 nt, synthetic construct
  modified_base 20..21: mod_base = OTHER; note = thymine
  modified_base 1: mod_base = OTHER; note = adenosine
  modified_base 2: mod_base = OTHER; note = cytidine
  modified_base 3: mod_base = OTHER; note = uridine
  modified_base 4: mod_base = OTHER; note = uridine
  modified_base 5: mod_base = OTHER; note = cytidine
  modified_base 6: mod_base = OTHER; note = uridine
  modified_base 7: mod_base = OTHER; note = uridine
  modified_base 8: mod_base = OTHER; note = guanosine
  modified_base 9: mod_base = OTHER; note = cytidine
  modified_base 10: mod_base = um
  modified_base 11: mod_base = OTHER; note = adenosine
  modified_base 12: mod_base = OTHER; note = adenosine
  modified_base 13: mod_base = OTHER; note = guanosine
  modified_base 14: mod_base = OTHER; note = uridine
  modified_base 15: mod_base = OTHER; note = cytidine
  modified_base 16: mod_base = OTHER; note = cytidine
  modified_base 17: mod_base = OTHER; note = uridine
  modified_base 18: mod_base = OTHER; note = guanosine
  modified_base 19: mod_base = OTHER; note = adenosine
  modified_base 20: mod_base = OTHER; note = 2'-deoxythymidine
  modified_base 21: mod_base = OTHER; note = 2'-deoxythymidine
  source 1..21: mol_type = other RNA
acttcttgctaagtcctgatt

SEQ ID NO: 1689 - RNA, 21 nt, synthetic construct
  modified_base 20..21: mod_base = OTHER; note = thymine
  modified_base 1: mod_base = OTHER; note = adenosine
  modified_base 2: mod_base = OTHER; note = adenosine
  modified_base 3: mod_base = OTHER; note = cytidine
  modified_base 4: mod_base = OTHER; note = uridine
  modified_base 5: mod_base = OTHER; note = uridine
  modified_base 6: mod_base = OTHER; note = cytidine
  modified_base 7: mod_base = OTHER; note = uridine
  modified_base 8: mod_base = OTHER; note = uridine
  modified_base 9: mod_base = OTHER; note = guanosine
  modified_base 10: mod_base = OTHER; note = cytidine
  modified_base 11: mod_base = um
  modified_base 12: mod_base = OTHER; note = adenosine
  modified_base 13: mod_base = OTHER; note = adenosine
  modified_base 14: mod_base = OTHER; note = guanosine
  modified_base 15: mod_base = OTHER; note = uridine
  modified_base 16: mod_base = OTHER; note = cytidine
  modified_base 17: mod_base = OTHER; note = cytidine
  modified_base 18: mod_base = OTHER; note = uridine
  modified_base 19: mod_base = OTHER; note = guanosine
  modified_base 20: mod_base = OTHER; note = 2'-deoxythymidine
  modified_base 21: mod_base = OTHER; note = 2'-deoxythymidine
  source 1..21: mol_type = other RNA
aacttcttgctaagtcctgtt

SEQ ID NO: 1690 - RNA, 21 nt, synthetic construct
  modified_base 20..21: mod_base = OTHER; note = thymine
  modified_base 1: mod_base = um
  modified_base 2: mod_base = OTHER; note = adenosine
  modified_base 3: mod_base = OTHER; note = adenosine
  modified_base 4: mod_base = OTHER; note = cytidine
  modified_base 5: mod_base = OTHER; note = uridine
  modified_base 6: mod_base = OTHER; note = uridine
  modified_base 7: mod_base = OTHER; note = cytidine
  modified_base 8: mod_base = OTHER; note = uridine
  modified_base 9: mod_base = OTHER; note = uridine
  modified_base 10: mod_base = OTHER; note = guanosine
  modified_base 11: mod_base = OTHER; note = cytidine
  modified_base 12: mod_base = um
  modified_base 13: mod_base = OTHER; note = adenosine
  modified_base 14: mod_base = OTHER; note = adenosine
  modified_base 15: mod_base = OTHER; note = guanosine
  modified_base 16: mod_base = OTHER; note = uridine
  modified_base 17: mod_base = OTHER; note = cytidine
  modified_base 18: mod_base = OTHER; note = cytidine
  modified_base 19: mod_base = OTHER; note = uridine
  modified_base 20: mod_base = OTHER; note = 2'-deoxythymidine
  modified_base 21: mod_base = OTHER; note = 2'-deoxythymidine
  source 1..21: mol_type = other RNA
taacttcttgctaagtccttt

SEQ ID NO: 1691 - RNA, 21 nt, synthetic construct
  modified_base 20..21: mod_base = OTHER; note = thymine
  modified_base 1: mod_base = OTHER; note = adenosine
  modified_base 2: mod_base = um
  modified_base 3: mod_base = OTHER; note = adenosine
  modified_base 4: mod_base = OTHER; note = adenosine
  modified_base 5: mod_base = OTHER; note = cytidine
  modified_base 6: mod_base = OTHER; note = uridine
  modified_base 7: mod_base = OTHER; note = uridine
  modified_base 8: mod_base = OTHER; note = cytidine
  modified_base 9: mod_base = OTHER; note = uridine
  modified_base 10: mod_base = OTHER; note = uridine
  modified_base 11: mod_base = OTHER; note = guanosine
  modified_base 12: mod_base = OTHER; note = cytidine
  modified_base 13: mod_base = um
  modified_base 14: mod_base = OTHER; note = adenosine
  modified_base 15: mod_base = OTHER; note = adenosine
  modified_base 16: mod_base = OTHER; note = guanosine
  modified_base 17: mod_base = OTHER; note = uridine
  modified_base 18: mod_base = OTHER; note = cytidine
  modified_base 19: mod_base = OTHER; note = cytidine
  modified_base 20: mod_base = OTHER; note = 2'-deoxythymidine
  modified_base 21: mod_base = OTHER; note = 2'-deoxythymidine
  source 1..21: mol_type = other RNA
ataacttcttgctaagtcctt

SEQ ID NO: 1692 - RNA, 21 nt, synthetic construct
  modified_base 20..21: mod_base = OTHER; note = thymine
  modified_base 1: mod_base = cm
  modified_base 2: mod_base = OTHER; note = adenosine
  modified_base 3: mod_base = um
  modified_base 4: mod_base = OTHER; note = adenosine
  modified_base 5: mod_base = OTHER; note = adenosine
  modified_base 6: mod_base = OTHER; note = cytidine
  modified_base 7: mod_base = OTHER; note = uridine
  modified_base 8: mod_base = OTHER; note = uridine
  modified_base 9: mod_base = OTHER; note = cytidine
  modified_base 10: mod_base = OTHER; note = uridine
  modified_base 11: mod_base = OTHER; note = uridine
  modified_base 12: mod_base = OTHER; note = guanosine
  modified_base 13: mod_base = OTHER; note = cytidine
  modified_base 14: mod_base = um
  modified_base 15: mod_base = OTHER; note = adenosine
  modified_base 16: mod_base = OTHER; note = adenosine
  modified_base 17: mod_base = OTHER; note = guanosine
  modified_base 18: mod_base = OTHER; note = uridine
  modified_base 19: mod_base = OTHER; note = cytidine
  modified_base 20: mod_base = OTHER; note = 2'-deoxythymidine
  modified_base 21: mod_base = OTHER; note = 2'-deoxythymidine
  source 1..21: mol_type = other RNA
cataacttcttgctaagtctt

SEQ ID NO: 1693 - RNA, 21 nt, synthetic construct
  modified_base 20..21: mod_base = OTHER; note = thymine
  modified_base 1: mod_base = OTHER; note = cytidine
  modified_base 2: mod_base = cm
  modified_base 3: mod_base = OTHER; note = adenosine
  modified_base 4: mod_base = um
  modified_base 5: mod_base = OTHER; note = adenosine
  modified_base 6: mod_base = OTHER; note = adenosine
  modified_base 7: mod_base = OTHER; note = cytidine
  modified_base 8: mod_base = OTHER; note = uridine
  modified_base 9: mod_base = OTHER; note = uridine
  modified_base 10: mod_base = OTHER; note = cytidine
  modified_base 11: mod_base = OTHER; note = uridine
  modified_base 12: mod_base = OTHER; note = uridine
  modified_base 13: mod_base = OTHER; note = guanosine
  modified_base 14: mod_base = OTHER; note = cytidine
  modified_base 15: mod_base = um
  modified_base 16: mod_base = OTHER; note = adenosine
  modified_base 17: mod_base = OTHER; note = adenosine
  modified_base 18: mod_base = OTHER; note = guanosine
  modified_base 19: mod_base = OTHER; note = uridine
  modified_base 20: mod_base = OTHER; note = 2'-deoxythymidine
  modified_base 21: mod_base = OTHER; note = 2'-deoxythymidine
  source 1..21: mol_type = other RNA
ccataacttcttgctaagttt

SEQ ID NO: 1694 - RNA, 21 nt, synthetic construct
  modified_base 20..21: mod_base = OTHER; note = thymine
  modified_base 1: mod_base = OTHER; note = uridine
  modified_base 2: mod_base = OTHER; note = cytidine
  modified_base 3: mod_base = cm
  modified_base 4: mod_base = OTHER; note = adenosine
  modified_base 5: mod_base = um
  modified_base 6: mod_base = OTHER; note = adenosine
  modified_base 7: mod_base = OTHER; note = adenosine
  modified_base 8: mod_base = OTHER; note = cytidine
  modified_base 9: mod_base = OTHER; note = uridine
  modified_base 10: mod_base = OTHER; note = uridine
  modified_base 11: mod_base = OTHER; note = cytidine
  modified_base 12: mod_base = OTHER; note = uridine
  modified_base 13: mod_base = OTHER; note = uridine
  modified_base 14: mod_base = OTHER; note = guanosine
  modified_base 15: mod_base = OTHER; note = cytidine
  modified_base 16: mod_base = um
  modified_base 17: mod_base = OTHER; note = adenosine
  modified_base 18: mod_base = OTHER; note = adenosine
  modified_base 19: mod_base = OTHER; note = guanosine
  modified_base 20: mod_base = OTHER; note = 2'-deoxythymidine
  modified_base 21: mod_base = OTHER; note = 2'-deoxythymidine
  source 1..21: mol_type = other RNA
tccataacttcttgctaagtt

SEQ ID NO: 1695 - RNA, 21 nt, synthetic construct
  modified_base 20..21: mod_base = OTHER; note = thymine
  modified_base 1: mod_base = OTHER; note = uridine
  modified_base 2: mod_base = OTHER; note = uridine
  modified_base 3: mod_base = OTHER; note = cytidine
  modified_base 4: mod_base = cm
  modified_base 5: mod_base = OTHER; note = adenosine
  modified_base 6: mod_base = um
  modified_base 7: mod_base = OTHER; note = adenosine
  modified_base 8: mod_base = OTHER; note = adenosine
  modified_base 9: mod_base = OTHER; note = cytidine
  modified_base 10: mod_base = OTHER; note = uridine
  modified_base 11: mod_base = OTHER; note = uridine
  modified_base 12: mod_base = OTHER; note = cytidine
  modified_base 13: mod_base = OTHER; note = uridine
  modified_base 14: mod_base = OTHER; note = uridine
  modified_base 15: mod_base = OTHER; note = guanosine
  modified_base 16: mod_base = OTHER; note = cytidine
  modified_base 17: mod_base = um
  modified_base 18: mod_base = OTHER; note = adenosine
  modified_base 19: mod_base = OTHER; note = adenosine
  modified_base 20: mod_base = OTHER; note = 2'-deoxythymidine
  modified_base 21: mod_base = OTHER; note = 2'-deoxythymidine
  source 1..21: mol_type = other RNA
ttccataacttcttgctaatt

SEQ ID NO: 1696 - RNA, 21 nt, synthetic construct
  modified_base 20..21: mod_base = OTHER; note = thymine
  modified_base 1: mod_base = OTHER; note = adenosine
  modified_base 2: mod_base = OTHER; note = uridine
  modified_base 3: mod_base = OTHER; note = uridine
  modified_base 4: mod_base = OTHER; note = cytidine
  modified_base 5: mod_base = cm
  modified_base 6: mod_base = OTHER; note = adenosine
  modified_base 7: mod_base = um
  modified_base 8: mod_base = OTHER; note = adenosine
  modified_base 9: mod_base = OTHER; note = adenosine
  modified_base 10: mod_base = OTHER; note = cytidine
  modified_base 11: mod_base = OTHER; note = uridine
  modified_base 12: mod_base = OTHER; note = uridine
  modified_base 13: mod_base = OTHER; note = cytidine
  modified_base 14: mod_base = OTHER; note = uridine
  modified_base 15: mod_base = OTHER; note = uridine
  modified_base 16: mod_base = OTHER; note = guanosine
  modified_base 17: mod_base = OTHER; note = cytidine
  modified_base 18: mod_base = um
  modified_base 19: mod_base = OTHER; note = adenosine
  modified_base 20: mod_base = OTHER; note = 2'-deoxythymidine
  modified_base 21: mod_base = OTHER; note = 2'-deoxythymidine
  source 1..21: mol_type = other RNA
attccataacttcttgctatt

SEQ ID NO: 1697 - RNA, 21 nt, synthetic construct
  modified_base 20..21: mod_base = OTHER; note = thymine
  modified_base 1: mod_base = OTHER; note = adenosine
  modified_base 2: mod_base = OTHER; note = adenosine
  modified_base 3: mod_base = OTHER; note = uridine
  modified_base 4: mod_base = OTHER; note = uridine
  modified_base 5: mod_base = OTHER; note = cytidine
  modified_base 6: mod_base = cm
  modified_base 7: mod_base = OTHER; note = adenosine
  modified_base 8: mod_base = um
  modified_base 9: mod_base = OTHER; note = adenosine
  modified_base 10: mod_base = OTHER; note = adenosine
  modified_base 11: mod_base = OTHER; note = cytidine
  modified_base 12: mod_base = OTHER; note = uridine
  modified_base 13: mod_base = OTHER; note = uridine
  modified_base 14: mod_base = OTHER; note = cytidine
  modified_base 15: mod_base = OTHER; note = uridine
  modified_base 16: mod_base = OTHER; note = uridine
  modified_base 17: mod_base = OTHER; note = guanosine
  modified_base 18: mod_base = OTHER; note = cytidine
  modified_base 19: mod_base = OTHER; note = uridine
  modified_base 20: mod_base = OTHER; note = 2'-deoxythymidine
  modified_base 21: mod_base = OTHER; note = 2'-deoxythymidine
  source 1..21: mol_type = other RNA
aattccataacttcttgcttt

SEQ ID NO: 1698 - RNA, 21 nt, synthetic construct
  modified_base 20..21: mod_base = OTHER; note = thymine
  modified_base 1: mod_base = OTHER; note = guanosine
  modified_base 2: mod_base = OTHER; note = adenosine
  modified_base 3: mod_base = OTHER; note = adenosine
  modified_base 4: mod_base = OTHER; note = uridine
  modified_base 5: mod_base = OTHER; note = uridine
  modified_base 6: mod_base = OTHER; note = cytidine
  modified_base 7: mod_base = cm
  modified_base 8: mod_base = OTHER; note = adenosine
  modified_base 9: mod_base = um
  modified_base 10: mod_base = OTHER; note = adenosine
  modified_base 11: mod_base = OTHER; note = adenosine
  modified_base 12: mod_base = OTHER; note = cytidine
  modified_base 13: mod_base = OTHER; note = uridine
  modified_base 14: mod_base = OTHER; note = uridine
  modified_base 15: mod_base = OTHER; note = cytidine
  modified_base 16: mod_base = OTHER; note = uridine
  modified_base 17: mod_base = OTHER; note = uridine
  modified_base 18: mod_base = OTHER; note = guanosine
  modified_base 19: mod_base = OTHER; note = cytidine
  modified_base 20: mod_base = OTHER; note = 2'-deoxythymidine
  modified_base 21: mod_base = OTHER; note = 2'-deoxythymidine
  source 1..21: mol_type = other RNA
gaattccataacttcttgctt

SEQ ID NO: 1699 - RNA, 21 nt, synthetic construct
  modified_base 20..21: mod_base = OTHER; note = thymine
  modified_base 1: mod_base = OTHER; note = guanosine
  modified_base 2: mod_base = OTHER; note = guanosine
  modified_base 3: mod_base = OTHER; note = adenosine
  modified_base 4: mod_base = OTHER; note = adenosine
  modified_base 5: mod_base = OTHER; note = uridine
  modified_base 6: mod_base = OTHER; note = uridine
  modified_base 7: mod_base = OTHER; note = cytidine
  modified_base 8: mod_base = cm
  modified_base 9: mod_base = OTHER; note = adenosine
  modified_base 10: mod_base = um
  modified_base 11: mod_base = OTHER; note = adenosine
  modified_base 12: mod_base = OTHER; note = adenosine
  modified_base 13: mod_base = OTHER; note = cytidine
  modified_base 14: mod_base = OTHER; note = uridine
  modified_base 15: mod_base = OTHER; note = uridine
  modified_base 16: mod_base = OTHER; note = cytidine
  modified_base 17: mod_base = OTHER; note = uridine
  modified_base 18: mod_base = OTHER; note = uridine
  modified_base 19: mod_base = OTHER; note = guanosine
  modified_base 20: mod_base = OTHER; note = 2'-deoxythymidine
  modified_base 21: mod_base = OTHER; note = 2'-deoxythymidine
  source 1..21: mol_type = other RNA
ggaattccataacttcttgtt

SEQ ID NO: 1700 - RNA, 21 nt, synthetic construct
  modified_base 20..21: mod_base = OTHER; note = thymine
  modified_base 1: mod_base = OTHER; note = adenosine
  modified_base 2: mod_base = OTHER; note = guanosine
  modified_base 3: mod_base = OTHER; note = guanosine
  modified_base 4: mod_base = OTHER; note = adenosine
  modified_base 5: mod_base = OTHER; note = adenosine
  modified_base 6: mod_base = OTHER; note = uridine
  modified_base 7: mod_base = OTHER; note = uridine
  modified_base 8: mod_base = OTHER; note = cytidine
  modified_base 9: mod_base = cm
  modified_base 10: mod_base = OTHER; note = adenosine
  modified_base 11: mod_base = um
  modified_base 12: mod_base = OTHER; note = adenosine
  modified_base 13: mod_base = OTHER; note = adenosine
  modified_base 14: mod_base = OTHER; note = cytidine
  modified_base 15: mod_base = OTHER; note = uridine
  modified_base 16: mod_base = OTHER; note = uridine
  modified_base 17: mod_base = OTHER; note = cytidine
  modified_base 18: mod_base = OTHER; note = uridine
  modified_base 19: mod_base = OTHER; note = uridine
  modified_base 20: mod_base = OTHER; note = 2'-deoxythymidine
  modified_base 21: mod_base = OTHER; note = 2'-deoxythymidine
  source 1..21: mol_type = other RNA
aggaattccataacttctttt

SEQ ID NO: 1701 - RNA, 21 nt, synthetic construct
  modified_base 20..21: mod_base = OTHER; note = thymine
  modified_base 1: mod_base = OTHER; note = adenosine
  modified_base 2: mod_base = OTHER; note = adenosine
  modified_base 3: mod_base = OTHER; note = guanosine
  modified_base 4: mod_base = OTHER; note = guanosine
  modified_base 5: mod_base = OTHER; note = adenosine
  modified_base 6: mod_base = OTHER; note = adenosine
  modified_base 7: mod_base = OTHER; note = uridine
  modified_base 8: mod_base = OTHER; note = uridine
  modified_base 9: mod_base = OTHER; note = cytidine
  modified_base 10: mod_base = cm
  modified_base 11: mod_base = OTHER; note = adenosine
  modified_base 12: mod_base = um
  modified_base 13: mod_base = OTHER; note = adenosine
  modified_base 14: mod_base = OTHER; note = adenosine
  modified_base 15: mod_base = OTHER; note = cytidine
  modified_base 16: mod_base = OTHER; note = uridine
  modified_base 17: mod_base = OTHER; note = uridine
  modified_base 18: mod_base = OTHER; note = cytidine
  modified_base 19: mod_base = OTHER; note = uridine
  modified_base 20: mod_base = OTHER; note = 2'-deoxythymidine
  modified_base 21: mod_base = OTHER; note = 2'-deoxythymidine
  source 1..21: mol_type = other RNA
aaggaattccataacttcttt

SEQ ID NO: 1702 - RNA, 21 nt, synthetic construct
  modified_base 20..21: mod_base = OTHER; note = thymine
  modified_base 1: mod_base = OTHER; note = adenosine
  modified_base 2: mod_base = OTHER; note = adenosine
  modified_base 3: mod_base = OTHER; note = adenosine
  modified_base 4: mod_base = OTHER; note = guanosine
  modified_base 5: mod_base = OTHER; note = guanosine
  modified_base 6: mod_base = OTHER; note = adenosine
  modified_base 7: mod_base = OTHER; note = adenosine
  modified_base 8: mod_base = OTHER; note = uridine
  modified_base 9: mod_base = OTHER; note = uridine
  modified_base 10: mod_base = OTHER; note = cytidine
  modified_base 11: mod_base = cm
  modified_base 12: mod_base = OTHER; note = adenosine
  modified_base 13: mod_base = um
  modified_base 14: mod_base = OTHER; note = adenosine
  modified_base 15: mod_base = OTHER; note = adenosine
  modified_base 16: mod_base = OTHER; note = cytidine
  modified_base 17: mod_base = OTHER; note = uridine
  modified_base 18: mod_base = OTHER; note = uridine
  modified_base 19: mod_base = OTHER; note = cytidine
  modified_base 20: mod_base = OTHER; note = 2'-deoxythymidine
  modified_base 21: mod_base = OTHER; note = 2'-deoxythymidine
  source 1..21: mol_type = other RNA
aaaggaattccataacttctt

SEQ ID NO: 1703 - RNA, 21 nt, synthetic construct
  modified_base 20..21: mod_base = OTHER; note = thymine
  modified_base 1: mod_base = OTHER; note = adenosine
  modified_base 2: mod_base = OTHER; note = adenosine
  modified_base 3: mod_base = OTHER; note = adenosine
  modified_base 4: mod_base = OTHER; note = adenosine
  modified_base 5: mod_base = OTHER; note = guanosine
  modified_base 6: mod_base = OTHER; note = guanosine
  modified_base 7: mod_base = OTHER; note = adenosine
  modified_base 8: mod_base = OTHER; note = adenosine
  modified_base 9: mod_base = OTHER; note = uridine
  modified_base 10: mod_base = OTHER; note = uridine
  modified_base 11: mod_base = OTHER; note = cytidine
  modified_base 12: mod_base = cm
  modified_base 13: mod_base = OTHER; note = adenosine
  modified_base 14: mod_base = um
  modified_base 15: mod_base = OTHER; note = adenosine
  modified_base 16: mod_base = OTHER; note = adenosine
  modified_base 17: mod_base = OTHER; note = cytidine
  modified_base 18: mod_base = OTHER; note = uridine
  modified_base 19: mod_base = OTHER; note = uridine
  modified_base 20: mod_base = OTHER; note = 2'-deoxythymidine
  modified_base 21: mod_base = OTHER; note = 2'-deoxythymidine
  source 1..21: mol_type = other RNA
aaaaggaattccataactttt

SEQ ID NO: 1704 - RNA, 21 nt, synthetic construct
  modified_base 20..21: mod_base = OTHER; note = thymine
  modified_base 1: mod_base = um
  modified_base 2: mod_base = OTHER; note = adenosine
  modified_base 3: mod_base = OTHER; note = adenosine
  modified_base 4: mod_base = OTHER; note = adenosine
  modified_base 5: mod_base = OTHER; note = adenosine
  modified_base 6: mod_base = OTHER; note = guanosine
  modified_base 7: mod_base = OTHER; note = guanosine
  modified_base 8: mod_base = OTHER; note = adenosine
  modified_base 9: mod_base = OTHER; note = adenosine
  modified_base 10: mod_base = OTHER; note = uridine
  modified_base 11: mod_base = OTHER; note = uridine
  modified_base 12: mod_base = OTHER; note = cytidine
  modified_base 13: mod_base = cm
  modified_base 14: mod_base = OTHER; note = adenosine
  modified_base 15: mod_base = um
  modified_base 16: mod_base = OTHER; note = adenosine
  modified_base 17: mod_base = OTHER; note = adenosine
  modified_base 18: mod_base = OTHER; note = cytidine
  modified_base 19: mod_base = OTHER; note = uridine
  modified_base 20: mod_base = OTHER; note = 2'-deoxythymidine
  modified_base 21: mod_base = OTHER; note = 2'-deoxythymidine
  source 1..21: mol_type = other RNA
taaaaggaattccataacttt

SEQ ID NO: 1705 - RNA, 21 nt, synthetic construct
  modified_base 20..21: mod_base = OTHER; note = thymine
  modified_base 1: mod_base = OTHER; note = adenosine
  modified_base 2: mod_base = um
  modified_base 3: mod_base = OTHER; note = adenosine
  modified_base 4: mod_base = OTHER; note = adenosine
  modified_base 5: mod_base = OTHER; note = adenosine
  modified_base 6: mod_base = OTHER; note = adenosine
  modified_base 7: mod_base = OTHER; note = guanosine
  modified_base 8: mod_base = OTHER; note = guanosine
  modified_base 9: mod_base = OTHER; note = adenosine
  modified_base 10: mod_base = OTHER; note = adenosine
  modified_base 11: mod_base = OTHER; note = uridine
  modified_base 12: mod_base = OTHER; note = uridine
  modified_base 13: mod_base = OTHER; note = cytidine
  modified_base 14: mod_base = cm
  modified_base 15: mod_base = OTHER; note = adenosine
  modified_base 16: mod_base = um
  modified_base 17: mod_base = OTHER; note = adenosine
  modified_base 18: mod_base = OTHER; note = adenosine
  modified_base 19: mod_base = OTHER; note = cytidine
  modified_base 20: mod_base = OTHER; note = 2'-deoxythymidine
  modified_base 21: mod_base = OTHER; note = 2'-deoxythymidine
  source 1..21: mol_type = other RNA
ataaaaggaattccataactt

SEQ ID NO: 1706 - RNA, 21 nt, synthetic construct
  modified_base 20..21: mod_base = OTHER; note = thymine
  modified_base 1: mod_base = OTHER; note = adenosine
  modified_base 2: mod_base = OTHER; note = adenosine
  modified_base 3: mod_base = um
  modified_base 4: mod_base = OTHER; note = adenosine
  modified_base 5: mod_base = OTHER; note = adenosine
  modified_base 6: mod_base = OTHER; note = adenosine
  modified_base 7: mod_base = OTHER; note = adenosine
  modified_base 8: mod_base = OTHER; note = guanosine
  modified_base 9: mod_base = OTHER; note = guanosine
  modified_base 10: mod_base = OTHER; note = adenosine
  modified_base 11: mod_base = OTHER; note = adenosine
  modified_base 12: mod_base = OTHER; note = uridine
  modified_base 13: mod_base = OTHER; note = uridine
  modified_base 14: mod_base = OTHER; note = cytidine
  modified_base 15: mod_base = cm
  modified_base 16: mod_base = OTHER; note = adenosine
  modified_base 17: mod_base = um
  modified_base 18: mod_base = OTHER; note = adenosine
  modified_base 19: mod_base = OTHER; note = adenosine
  modified_base 20: mod_base = OTHER; note = 2'-deoxythymidine
  modified_base 21: mod_base = OTHER; note = 2'-deoxythymidine
  source 1..21: mol_type = other RNA
aataaaaggaattccataatt

SEQ ID NO: 1707 - RNA, 21 nt, synthetic construct
  modified_base 20..21: mod_base = OTHER; note = thymine
  modified_base 1: mod_base = cm
  modified_base 2: mod_base = OTHER; note = adenosine
  modified_base 3: mod_base = OTHER; note = adenosine
  modified_base 4: mod_base = um
  modified_base 5: mod_base = OTHER; note = adenosine
  modified_base 6: mod_base = OTHER; note = adenosine
  modified_base 7: mod_base = OTHER; note = adenosine
  modified_base 8: mod_base = OTHER; note = adenosine
  modified_base 9: mod_base = OTHER; note = guanosine
  modified_base 10: mod_base = OTHER; note = guanosine
  modified_base 11: mod_base = OTHER; note = adenosine
  modified_base 12: mod_base = OTHER; note = adenosine
  modified_base 13: mod_base = OTHER; note = uridine
  modified_base 14: mod_base = OTHER; note = uridine
  modified_base 15: mod_base = OTHER; note = cytidine
  modified_base 16: mod_base = cm
  modified_base 17: mod_base = OTHER; note = adenosine
  modified_base 18: mod_base = um
  modified_base 19: mod_base = OTHER; note = adenosine
  modified_base 20: mod_base = OTHER; note = 2'-deoxythymidine
  modified_base 21: mod_base = OTHER; note = 2'-deoxythymidine
  source 1..21: mol_type = other RNA
caataaaaggaattccatatt

SEQ ID NO: 1708 - RNA, 21 nt, synthetic construct
  modified_base 1: mod_base = OTHER; note = uridine
  modified_base 2: mod_base = cm
  modified_base 3: mod_base = OTHER; note = adenosine
  modified_base 4: mod_base = OTHER; note = adenosine
  modified_base 5: mod_base = um
  modified_base 6: mod_base = OTHER; note = adenosine
  modified_base 7: mod_base = OTHER; note = adenosine
  modified_base 8: mod_base = OTHER; note = adenosine
  modified_base 9: mod_base = OTHER; note = adenosine
  modified_base 10: mod_base = OTHER; note = guanosine
  modified_base 11: mod_base = OTHER; note = guanosine
  modified_base 12: mod_base = OTHER; note = adenosine
  modified_base 13: mod_base = OTHER; note = adenosine
  modified_base 14: mod_base = OTHER; note = uridine
  modified_base 15: mod_base = OTHER; note = uridine
  modified_base 16: mod_base = OTHER; note = cytidine
  modified_base 17: mod_base = cm
  modified_base 18: mod_base = OTHER; note = adenosine
  modified_base 19: mod_base = OTHER; note = uridine
  modified_base 20: mod_base = OTHER; note = 2'-deoxythymidine
  modified_base 21: mod_base = OTHER; note = 2'-deoxythymidine
  source 1..21: mol_type = other RNA
  modified_base 20..21: mod_base = OTHER; note = thymine
tcaataaaaggaattccattt

SEQ ID NO: 1709 - DNA, 5312 bp, Macaca fascicularis
  source 1..5312: mol_type = other DNA
nnnnnnnnnnnnnnnnnnnnnnnnnnnnnnnnnnnnnnnnnnnnnnnnnnnnnnnnnnnnnnnnnnnnnnnnnnnnnnnnnnnnnnnnnnnnnnnnnnnnnnnnnnnnnnnnaggcactgaaggcggcggcggggccagaggctcagcggctccccggggcgggagagagnnnnnnnnnnnnnnnnnnnnnnnnnnnnnnnnnnagttggagctggtggggtaggcaagagtgccttgacnnnnnngctaattcagaatcattttgtggacgaatatgatccaacaatagaggattcctacaggaagcaagtagtaattgatggagaaacctgtctcttggatattctcgacacagcaggtcaagaggagtacagtgcaatgagggaccagtacatgaggactggggagggctttctttgtgtatttgccataaataatactaaatcatttgaagatattcaccattatagagaacaaattaaaagagttaaggactctgaagatgtacctatggtcctagtaggaaataaatgtgatttgccttctagaacagtagacacaaaacaggctcaggacttagcaagaagttacggaattccttttattgaaacatcagcaaagacaagacagggtgttgatgatgccttctatacattagttcgagaaattcgaaaacataaagaaaagatgagcaaagatggtaaaaagaagaaaaagaagtcaaagacaaagtgtgtaattatgtaaatacaatttgtacttttttcttaaggcatactagtaaaagtggtaatttttgtacattacactaaattattagcatttgttttagcattacctaatttttttcctgctccatgcagactgttagcttttaccttaaatgcttattttaaaatgacagtggaagcttttttttcctctaagtgccagtattcccagagttttgatttttgaactagcaatgcctgtgaaaaagaaactgaatacctaagatttctgtcttggggtttttggtgcnnnnnnnnnnnnnnnnnnnnnnnnnnnnnnnnnnnnnnnnnnnnnnnnnnnnnnnaattaatgaagcttctgaatcatccctattctgtgttttatctagtcacataaatggattaattactaatttcagttgagaccttctaattggtttttactgaaacattgagggaacacaaannnnnnnnnnnnnnnnnnnnnnnnnntctaggcatcatgtcctatagtttgtcatccctgatgaatgtaaagttacactgttcacaaaggttttgttccctttccactgctattagtcatggtcactctccccgnnnnnnnnnnnnnnnnnnnnnnnnnnnnnnnnntggaaaaaaattacaagtcaatggaaactattataaggccgtttccttttcacattagataaattactataaagactcctaatagcttttcctgttaaggcagacccagtatgaaatggggattnnnnnnnnnnnnnnnnnnnnnnnnnnnnnnnnnnnnnnnnaatttttataataattgaaataattttaacatgtataaaaaattctcataggaattaaatgtagtctccctgtgtcagattgctctttcatagtataactttaaatcttttcttcaacttcagtctttgaaggtagttttaattctgcttgtgacattaaaagattatttgggccagttatagcttagtaggtgttgaagagaccaaggttgcatggccaggccctgtgtgaacctttgagctttcatagagagtttcacagcatggactgtgtccccatggtcatccagtgttgtcatgcattggttagtcaaaatggggagggactaggacagtttggataggtcaacaagatacattctcactctgtggtggtcctgctgacaaatcaagagcattgcttttgttttttaagaaaatgaactcttttttaaaaattacttttaaatattaactcaaaagttgagattttgggggggtggtatgccaagacattaatttttttnnnnnnnnnnnnnnnnnnnaagttttacaatctctaggtttggctagttctcttaacactggttaaattaacatttcataaacacttttcaagnnnnnnnnnnnnnnnnnnnnnnnnnnnnnnnnnnnnnnnnnnnnnnnnnnnnnnnnatttaaaatgttacttattttaaaatatatgaaatgagatggcatggtgaggtgaaagtatcactggactannaagaaggtgacttaggttctagatagttgtcttttaggactctgattttgaggacatcacttactatccatttcttcatgttaannnnnnnnnnnnnnnnnnnnnnnnnnnnnntttttacaactatgtgatttatattccgtttacatgaggatacacttatttgtcaagctcagcacaatctaaaaatttttaacctatgttacaccatcttcagtgccaatcttgggcaaaattgtgcaagaggtgaagtttatatttgaatatccattctcgttttaggactctccttccatgttagtgtcatcttgcctgcctaccttccacatgccccatgacttgatgcagttttaatacttctaattcccctaaccataagatttactgctgctatggatatctccatgaagttttcccnnnnnnnnnnnnnnnnnnnnnnnnnnnnnnnnnnnnnnnnnnnnnnnngagaatctgacagataccataatgggatttgacctaatcactaattttcaggtggtggccgatcctttgaaaatatctctgctgcccaatccattagcgacagtaggatttttcagacctggtatgaatagacagaaccctatccagtggaaggagaatttaataaagatagtactgaaataattcctaaggtaatctacaactaggactactcctggtaacagtaatacattccattgttttagtaaccagaaatnnnnnnnnnnnnnnnnnnnnnnnnnnnnnnnnnnnnnnnnnnnnnnnnnnnnnnnnnnnnnnnnnnnnnnnnnnnccaggctggaatgcagtggcgccatctcagctcactgcaacctccatctcccaggttcaagcgattctcgtgcctcggcatcctgagtagctgggattacaggcatgtgccnccacactcaactaatttttgtagttttaggagagacagggtttcaccctattggccaggctggtctcgaactcctgacctcaagtgattcacccacctnnncctcataaagccgttttgcagaactcatttattcagcaaatatttattgagtgcctaccagatgccagtcatttcacaaggcactgggtatatggtatccccaaacaagagacataatcctggtccttagctagtgctagcnnnnnnnnnnnnnnnnnnnnnnnnnnnnnnnnnnnnnnnnnnnnnnnnnnnnnnnnnnnnnnnnnnnnnnnnnnnnnnggggtttggtccctgtgcctgctctataattgttttgctatgattccagtgaaannnnnnnnnnnnnnnnnnnnnnnnnnnnnnnnnnnnnnnnnnnnnnnnnnnnnnnnnnnnnnnnnnnnnnnnnnnnnnnnnnnnnnnnnnnnnnnnnnnnnnnnttactgtacacattaaggtgtatgtcagatatccatattgaannnnnnnnnnnnnnnnnnnnnnnnnnnnnnnnnnataattaaaatatacttaaaaattaatagttttatctgggtacaaacaaacaggtgcctgaactagttcacagacaaggaaacttctatgtaaaaatcagtatgatttnnnnnnnnnnnngtgaaactacagatctttggaacattgtttagatagggtgttaagacttacacagtaccacgtttctacacacagaaagaaatggccatacttcaggaactgcagtgctaatgaggggatatttaggcctcttgaatttttgatgtagatgggcatttttttaaggtanntggtaattacctttatgtgaactttgaatggtttaacaaaagatttgtttttgtagagattttaaagggggagaatgctagaaataaatgttatctaannnnnnncgccttaaagataaaaatccttgttgaagttttttaaaaaaaagctaaattacatagtcttaggcattaacatgtttgtggaagaatatagcacacatatattgtatcatttgagtgaatattcccaaataggcattctaggctctatttaactgagtcacactgcataggaatttagaacctaacttttataggttatcaaaactgttgcctccattgcacaattttgtcctaatacatacatggagactttgtggggcatgttaagttacagtttgcacaagttcatctcatttgtattccattgattttttttttcttctaaacattttttcttcaaacagtatataactttttttaggggattttttttnnnnnnnnnnnnnnnntctgacgatttccatttgtcaaaaagtaatgatttcttgataattatgtagtaatgtttttaagaacccagcagttaccttaaagctgaatttatatttaataacttctgtgttaatactggatagcatgaattctgcattgagaaactgaatagnnnnnnnnnnnnnnnnnnnnnnnnnnnnnnnnnnnnnnnnncatgagttcttgaagaatagtcataactagattaagatctgtgttttagtttaatagtttgaagtgcctgtttgggataatgataggtaatttagatgaatttagggggaaaaaaagttatctgcagaaatgttgagggcccatctctccccacacacccacatagagctaactgggttacagtgttttatccgaaagtttccaattccactgtcttgtgttttcatgttgaaaatacttttgcatttttcctttgagtgccaatttcttactagtactatttcttaatgtaacatgtttacctggaatgtattttaactatttttgtatagtgtaaactgaaacatgcacattttgtacattgtgctttcttttgtgggacatatgcagtgtgatccagttgttttccatcatttggttgcgctgacctaggaatgttggtcatatcaaacattaaaaatgaccactcttttaattgaaattaacttttaaatgtttataggagtatgtgctgtgaagtgatctaaaatttgtaatatttttgtcatgaactgtactactcctaattattgtaatgtaataaaaatagttacagtgacaaaaaaaaaaannnn

SEQ ID NO: 1710 - DNA, 2015 bp, Homo sapiens
  source 1..2015: mol_type = other DNA
aggcactgaaggcggcggcggggccagaggctcagcggctcccaggtgcgggagagaggcctgctgaaaatgactgaatataaacttgtggtagttggagctggtggcgtaggcaagagtgccttgacgatacagctaattcagaatcattttgtggacgaatatgatccaacaatagaggattcctacaggaagcaagtagtaattgatggagaaacctgtctcttggatattctcgacacagcaggtcaagaggagtacagtgcaatgagggaccagtacatgaggactggggagggctttctttgtgtatttgccataaataatactaaatcatttgaagatattcaccattatagagaacaaattaaaagagttaaggactctgaagatgtacctatggtcctagtaggaaataaatgtgatttgccttctagaacagtagacacaaaacaggctcaggacttagcaagaagttatggaattccttttattgaaacatcagcaaagacaagacagggtgttgatgatgccttctatacattagttcgagaaattcgaaaacataaagaaaagatgagcaaagatggtaaaaagaagaaaaagaagtcaaagacaaagtgtgtaattatgtaaatacaatttgtacttttttcttaaggcatactagtacaagtggtaatttttgtacattacactaaattattagcatttgttttagcattacctaatttttttcctgctccatgcagactgttagcttttaccttaaatgcttattttaaaatgacagtggaagtttttttttcctctaagtgccagtattcccagagttttggtttttgaactagcaatgcctgtgaaaaagaaactgaatacctaagatttctgtcttggggtttttggtgcatgcagttgattacttcttatttttcttaccaattgtgaatgttggtgtgaaacaaattaatgaagcttttgaatcatccctattctgtgttttatctagtcacataaatggattaattactaatttcagttgagaccttctaattggtttttactgaaacattgagggaacacaaatttatgggcttcctgatgatgattcttctaggcatcatgtcctatagtttgtcatccctgatgaatgtaaagttacactgttcacaaaggttttgtctcctttccactgctattagtcatggtcactctccccaaaatattatattttttctataaaaagaaaaaaatggaaaaaaattacaaggcaatggaaactattataaggccatttccttttcacattagataaattactataaagactcctaatagcttttcctgttaaggcagacccagtatgaaatggggattattatagcaaccattttggggctatatttacatgctactaaatttttataataattgaaaagattttaacaagtataaaaaattctcataggaattaaatgtagtctccctgtgtcagactgctctttcatagtataactttaaatcttttcttcaacttgagtctttgaagatagttttaattctgcttgtgacattaaaagattatttgggccagttatagcttattaggtgttgaagagaccaaggttgcaaggccaggccctgtgtgaacctttgagctttcatagagagtttcacagcatggactgtgtccccacggtcatccagtgttgtcatgcattggttagtcaaaatggggagggactagggcagtttggatagctcaacaagatacaatctcactctgtggtggtcctgctgacaaatcaagagcattgcttttgtttcttaagaaaacaaactcttttttaaaaattacttttaaatattaactcaaaagttgagattttggggtggtggtgtgccaagacattaattttttttttaaacaatgaagtgaaaaagttttacaatctctaggtttggctagttctcttaacactggttaaattaacattgcataaacacttttcaag

SEQ ID NO: 1711 - DNA, 2015 bp, Macaca fascicularis
  source 1..2015: mol_type = other DNA
aggcactgaaggcggcggcggggccagaggctcagcggctccccggggcgggagagagnnnnnnnnnnnnnnnnnnnnnnnnnnnnnnnnnnagttggagctggtggggtaggcaagagtgccttgacnnnnnngctaattcagaatcattttgtggacgaatatgatccaacaatagaggattcctacaggaagcaagtagtaattgatggagaaacctgtctcttggatattctcgacacagcaggtcaagaggagtacagtgcaatgagggaccagtacatgaggactggggagggctttctttgtgtatttgccataaataatactaaatcatttgaagatattcaccattatagagaacaaattaaaagagttaaggactctgaagatgtacctatggtcctagtaggaaataaatgtgatttgccttctagaacagtagacacaaaacaggctcaggacttagcaagaagttacggaattccttttattgaaacatcagcaaagacaagacagggtgttgatgatgccttctatacattagttcgagaaattcgaaaacataaagaaaagatgagcaaagatggtaaaaagaagaaaaagaagtcaaagacaaagtgtgtaattatgtaaatacaatttgtacttttttcttaaggcatactagtaaaagtggtaatttttgtacattacactaaattattagcatttgttttagcattacctaatttttttcctgctccatgcagactgttagcttttaccttaaatgcttattttaaaatgacagtggaagcttttttttcctctaagtgccagtattcccagagttttgatttttgaactagcaatgcctgtgaaaaagaaactgaatacctaagatttctgtcttggggtttttggtgcnnnnnnnnnnnnnnnnnnnnnnnnnnnnnnnnnnnnnnnnnnnnnnnnnnnnnnnaattaatgaagcttctgaatcatccctattctgtgttttatctagtcacataaatggattaattactaatttcagttgagaccttctaattggtttttactgaaacattgagggaacacaaannnnnnnnnnnnnnnnnnnnnnnnnntctaggcatcatgtcctatagtttgtcatccctgatgaatgtaaagttacactgttcacaaaggttttgttccctttccactgctattagtcatggtcactctccccgnnnnnnnnnnnnnnnnnnnnnnnnnnnnnnnnntggaaaaaaattacaagtcaatggaaactattataaggccgtttccttttcacattagataaattactataaagactcctaatagcttttcctgttaaggcagacccagtatgaaatggggattnnnnnnnnnnnnnnnnnnnnnnnnnnnnnnnnnnnnnnnnaatttttataataattgaaataattttaacatgtataaaaaattctcataggaattaaatgtagtctccctgtgtcagattgctctttcatagtataactttaaatcttttcttcaacttcagtctttgaaggtagttttaattctgcttgtgacattaaaagattatttgggccagttatagcttagtaggtgttgaagagaccaaggttgcatggccaggccctgtgtgaacctttgagctttcatagagagtttcacagcatggactgtgtccccatggtcatccagtgttgtcatgcattggttagtcaaaatggggagggactaggacagtttggataggtcaacaagatacattctcactctgtggtggtcctgctgacaaatcaagagcattgcttttgttttttaagaaaatgaactcttttttaaaaattacttttaaatattaactcaaaagttgagattttgggggggtggtatgccaagacattaatttttttnnnnnnnnnnnnnnnnnnnaagttttacaatctctaggtttggctagttctcttaacactggttaaattaacatttcataaacacttttcaag

SEQ ID NO: 1712 - DNA, 794 bp, Homo sapiens
  source 1..794: mol_type = other DNA
atttaaaatgttacttattttaaaataaatgaagtgagatggcatggtgaggtgaaagtatcactggactaggaagaaggtgacttaggttctagataggtgtcttttaggactctgattttgaggacatcacttactatccatttcttcatgttaaaagaagtcatctcaaactcttagttttttttttttacaactatgtaatttatattccatttacataaggatacacttatttgtcaagctcagcacaatctgtaaatttttaacctatgttacaccatcttcagtgccagtcttgggcaaaattgtgcaagaggtgaagtttatatttgaatatccattctcgttttaggactcttcttccatattagtgtcatcttgcctccctaccttccacatgccccatgacttgatgcagttttaatacttgtaattcccctaaccataagatttactgctgctgtggatatctccatgaagttttcccactgagtcacatcagaaatgccctacatcttatttcctcagggctcaagagaatctgacagataccataaagggatttgacctaatcactaattttcaggtggtggctgatgctttgaacatctctttgctgcccaatccattagcgacagtaggatttttcaaacctggtatgaatagacagaaccctatccagtggaaggagaatttaataaagatagtgctgaaagaattccttaggtaatctataactaggactactcctggtaacagtaatacattccattgttttagtaaccagaaat

SEQ ID NO: 1713 - DNA, 794 bp, Macaca fascicularis
  source 1..794: mol_type = other DNA
atttaaaatgttacttattttaaaatatatgaaatgagatggcatggtgaggtgaaagtatcactggactannaagaaggtgacttaggttctagatagttgtcttttaggactctgattttgaggacatcacttactatccatttcttcatgttaannnnnnnnnnnnnnnnnnnnnnnnnnnnnntttttacaactatgtgatttatattccgtttacatgaggatacacttatttgtcaagctcagcacaatctaaaaatttttaacctatgttacaccatcttcagtgccaatcttgggcaaaattgtgcaagaggtgaagtttatatttgaatatccattctcgttttaggactctccttccatgttagtgtcatcttgcctgcctaccttccacatgccccatgacttgatgcagttttaatacttctaattcccctaaccataagatttactgctgctatggatatctccatgaagttttcccnnnnnnnnnnnnnnnnnnnnnnnnnnnnnnnnnnnnnnnnnnnnnnnngagaatctgacagataccataatgggatttgacctaatcactaattttcaggtggtggccgatcctttgaaaatatctctgctgcccaatccattagcgacagtaggatttttcagacctggtatgaatagacagaaccctatccagtggaaggagaatttaataaagatagtactgaaataattcctaaggtaatctacaactaggactactcctggtaacagtaatacattccattgttttagtaaccagaaat

SEQ ID NO: 1714 - DNA, 1666 bp, Homo sapiens
  source 1..1666: mol_type = other DNA
ttactgtacacattaaggtgtatgtcagatattcatattgacccaaatgtgtaatattccagttttctctgcataagtaattaaaatatacttaaaaattaatagttttatctgggtacaaataaacaggtgcctgaactagttcacagacaaggaaacttctatgtaaaaatcactatgatttctgaattgctatgtgaaactacagatctttggaacactgtttaggtagggtgttaagacttacacagtacctcgtttctacacagagaaagaaatggccatacttcaggaactgcagtgcttatgaggggatatttaggcctcttgaatttttgatgtagatgggcatttttttaaggtagtggttaattacctttatgtgaactttgaatggtttaacaaaagatttgtttttgtagagattttaaagggggagaattctagaaataaatgttacctaattattacagccttaaagacaaaaatccttgttgaagtttttttaaaaaaagctaaattacatagacttaggcattaacatgtttgtggaagaatatagcagacgtatattgtatcatttgagtgaatgttcccaagtaggcattctaggctctatttaactgagtcacactgcataggaatttagaacctaacttttataggttatcaaaactgttgtcaccattgcacaattttgtcctaatatatacatagaaactttgtggggcatgttaagttacagtttgcacaagttcatctcatttgtattccattgattttttttttcttctaaacattttttcttcaaacagtatataactttttttaggggatttttttttagacagcaaaaactatctgaagatttccatttgtcaaaaagtaatgatttcttgataattgtgtagtaatgttttttagaacccagcagttaccttaaagctgaatttatatttagtaacttctgtgttaatactggatagcatgaattctgcattgagaaactgaatagctgtcataaaatgaaactttctttctaaagaaagatactcacatgagttcttgaagaatagtcataactagattaagatctgtgttttagtttaatagtttgaagtgcctgtttgggataatgataggtaatttagatgaatttaggggaaaaaaaagttatctgcagatatgttgagggcccatctctccccccacacccccacagagctaactgggttacagtgttttatccgaaagtttccaattccactgtcttgtgttttcatgttgaaaatacttttgcatttttcctttgagtgccaatttcttactagtactatttcttaatgtaacatgtttacctggaatgtattttaactatttttgtatagtgtaaactgaaacatgcacattttgtacattgtgctttcttttgtgggacatatgcagtgtgatccagttgttttccatcatttggttgcgctgacctaggaatgttggtcatatcaaacattaaaaatgaccactcttttaattgaaattaacttttaaatgtttataggagtatgtgctgtgaagtgatctaaaatttgtaatatttttgtcatgaactgtactactcctaattattgtaatgtaataaaaatagttacagtgacaaaaaaaaaaa

SEQ ID NO: 1715 - DNA, 1666 bp, Macaca fascicularis
  source 1..1666: mol_type = other DNA
ttactgtacacattaaggtgtatgtcagatatccatattgaannnnnnnnnnnnnnnnnnnnnnnnnnnnnnnnnnataattaaaatatacttaaaaattaatagttttatctgggtacaaacaaacaggtgcctgaactagttcacagacaaggaaacttctatgtaaaaatcagtatgatttnnnnnnnnnnnngtgaaactacagatctttggaacattgtttagatagggtgttaagacttacacagtaccacgtttctacacacagaaagaaatggccatacttcaggaactgcagtgctaatgaggggatatttaggcctcttgaatttttgatgtagatgggcatttttttaaggtanntggtaattacctttatgtgaactttgaatggtttaacaaaagatttgtttttgtagagattttaaagggggagaatgctagaaataaatgttatctaannnnnnncgccttaaagataaaaatccttgttgaagttttttaaaaaaaagctaaattacatagtcttaggcattaacatgtttgtggaagaatatagcacacatatattgtatcatttgagtgaatattcccaaataggcattctaggctctatttaactgagtcacactgcataggaatttagaacctaacttttataggttatcaaaactgttgcctccattgcacaattttgtcctaatacatacatggagactttgtggggcatgttaagttacagtttgcacaagttcatctcatttgtattccattgattttttttttcttctaaacattttttcttcaaacagtatataactttttttaggggattttttttnnnnnnnnnnnnnnnntctgacgatttccatttgtcaaaaagtaatgatttcttgataattatgtagtaatgtttttaagaacccagcagttaccttaaagctgaatttatatttaataacttctgtgttaatactggatagcatgaattctgcattgagaaactgaatagnnnnnnnnnnnnnnnnnnnnnnnnnnnnnnnnnnnnnnnnncatgagttcttgaagaatagtcataactagattaagatctgtgttttagtttaatagtttgaagtgcctgtttgggataatgataggtaatttagatgaatttagggggaaaaaaagttatctgcagaaatgttgagggcccatctctccccacacacccacatagagctaactgggttacagtgttttatccgaaagtttccaattccactgtcttgtgttttcatgttgaaaatacttttgcatttttcctttgagtgccaatttcttactagtactatttcttaatgtaacatgtttacctggaatgtattttaactatttttgtatagtgtaaactgaaacatgcacattttgtacattgtgctttcttttgtgggacatatgcagtgtgatccagttgttttccatcatttggttgcgctgacctaggaatgttggtcatatcaaacattaaaaatgaccactcttttaattgaaattaacttttaaatgtttataggagtatgtgctgtgaagtgatctaaaatttgtaatatttttgtcatgaactgtactactcctaattattgtaatgtaataaaaatagttacagtgacaaaaaaaaaaa

SEQ ID NO: 1716 - DNA, 19 bp, synthetic construct
  source 1..19: mol_type = other DNA
acttgtggtagttggagct

SEQ ID NO: 1717 - DNA, 19 bp, synthetic construct
  source 1..19: mol_type = other DNA
gcaagagtgccttgacgat

SEQ ID NO: 1718 - DNA, 19 bp, synthetic construct
  source 1..19: mol_type = other DNA
caagagtgccttgacgata

SEQ ID NO: 1719 - DNA, 19 bp, synthetic construct
  source 1..19: mol_type = other DNA
ccttgacgatacagctaat

SEQ ID NO: 1720 - DNA, 19 bp, synthetic construct
  source 1..19: mol_type = other DNA
cagctaattcagaatcatt

SEQ ID NO: 1721 - DNA, 19 bp, synthetic construct
  source 1..19: mol_type = other DNA
cgaatatgatccaacaata

SEQ ID NO: 1722 - DNA, 19 bp, synthetic construct
  source 1..19: mol_type = other DNA
ggaagcaagtagtaattga

SEQ ID NO: 1723 - DNA, 19 bp, synthetic construct
  source 1..19: mol_type = other DNA
gaagcaagtagtaattgat

SEQ ID NO: 1724 - DNA, 19 bp, synthetic construct
  source 1..19: mol_type = other DNA
agtagtaattgatggagaa

SEQ ID NO: 1725 - DNA, 19 bp, synthetic construct
  source 1..19: mol_type = other DNA
tagtaattgatggagaaac

SEQ ID NO: 1726 - DNA, 19 bp, synthetic construct
  source 1..19: mol_type = other DNA
gtctcttggatattctcga

SEQ ID NO: 1727 - DNA, 19 bp, synthetic construct
  source 1..19: mol_type = other DNA
gggctttctttgtgtattt

SEQ ID NO: 1728 - DNA, 19 bp, synthetic construct
  source 1..19: mol_type = other DNA
gtgtatttgccataaataa

SEQ ID NO: 1729 - DNA, 19 bp, synthetic construct
  source 1..19: mol_type = other DNA
ccataaataatactaaatc

SEQ ID NO: 1730 - DNA, 19 bp, synthetic construct
  source 1..19: mol_type = other DNA
tactaaatcatttgaagat

SEQ ID NO: 1731 - DNA, 19 bp, synthetic construct
  source 1..19: mol_type = other DNA
ctaaatcatttgaagatat

SEQ ID NO: 1732 - DNA, 19 bp, synthetic construct
  source 1..19: mol_type = other DNA
gaagatattcaccattata

SEQ ID NO: 1733 - DNA, 19 bp, synthetic construct
  source 1..19: mol_type = other DNA
agatattcaccattataga

SEQ ID NO: 1734 - DNA, 19 bp, synthetic construct
  source 1..19: mol_type = other DNA
atattcaccattatagaga

SEQ ID NO: 1735 - DNA, 19 bp, synthetic construct
  source 1..19: mol_type = other DNA
tattcaccattatagagaa

SEQ ID NO: 1736 - DNA, 19 bp, synthetic construct
  source 1..19: mol_type = other DNA
cattatagagaacaaatta

SEQ ID NO: 1737 - DNA, 19 bp, synthetic construct
  source 1..19: mol_type = other DNA
ttatagagaacaaattaaa

SEQ ID NO: 1738 - DNA, 19 bp, synthetic construct
  source 1..19: mol_type = other DNA
gagttaaggactctgaaga

SEQ ID NO: 1739 - DNA, 19 bp, synthetic construct
  source 1..19: mol_type = other DNA
ctatggtcctagtaggaaa

SEQ ID NO: 1740 - DNA, 19 bp, synthetic construct
  source 1..19: mol_type = other DNA
tggtcctagtaggaaataa

SEQ ID NO: 1741 - DNA, 19 bp, synthetic construct
  source 1..19: mol_type = other DNA
ggtcctagtaggaaataaa

SEQ ID NO: 1742 - DNA, 19 bp, synthetic construct
  source 1..19: mol_type = other DNA
gtaggaaataaatgtgatt

SEQ ID NO: 1743 - DNA, 19 bp, synthetic construct
  source 1..19: mol_type = other DNA
atgtgatttgccttctaga

SEQ ID NO: 1744 - DNA, 19 bp, synthetic construct
  source 1..19: mol_type = other DNA
ccttctagaacagtagaca

SEQ ID NO: 1745 - DNA, 19 bp, synthetic construct
  source 1..19: mol_type = other DNA
aggctcaggacttagcaag

SEQ ID NO: 1746 - DNA, 19 bp, synthetic construct
  source 1..19: mol_type = other DNA
ggacttagcaagaagttat

SEQ ID NO: 1747 - DNA, 19 bp, synthetic construct
  source 1..19: mol_type = other DNA
agcaagaagttatggaatt

SEQ ID NO: 1748 - DNA, 19 bp, synthetic construct
  source 1..19: mol_type = other DNA
ttatggaattccttttatt

SEQ ID NO: 1749 - DNA, 19 bp, synthetic construct
  source 1..19: mol_type = other DNA
ggaattccttttattgaaa

SEQ ID NO: 1750 - DNA, 19 bp, synthetic construct
  source 1..19: mol_type = other DNA
ccttttattgaaacatcag

SEQ ID NO: 1751 - DNA, 19 bp, synthetic construct
  source 1..19: mol_type = other DNA
cctgatgaatgtaaagtta

SEQ ID NO: 1752 - DNA, 19 bp, synthetic construct
  source 1..19: mol_type = other DNA
ggagaatttaataaagata

SEQ ID NO: 1753 - DNA, 19 bp, synthetic construct
  source 1..19: mol_type = other DNA
gaatagtcataactagatt

SEQ ID NO: 1754 - DNA, 19 bp, synthetic construct
  source 1..19: mol_type = other DNA
agctccaactaccacaagt

SEQ ID NO: 1755 - DNA, 19 bp, synthetic construct
  source 1..19: mol_type = other DNA
atcgtcaaggcactcttgc

SEQ ID NO: 1756 - DNA, 19 bp, synthetic construct
  source 1..19: mol_type = other DNA
tatcgtcaaggcactcttg

SEQ ID NO: 1757 - DNA, 19 bp, synthetic construct
  source 1..19: mol_type = other DNA
attagctgtatcgtcaagg

SEQ ID NO: 1758 - DNA, 19 bp, synthetic construct
  source 1..19: mol_type = other DNA
aatgattctgaattagctg

SEQ ID NO: 1759 - DNA, 19 bp, synthetic construct
  source 1..19: mol_type = other DNA
tattgttggatcatattcg

SEQ ID NO: 1760 - DNA, 19 bp, synthetic construct
  source 1..19: mol_type = other DNA
tcaattactacttgcttcc

SEQ ID NO: 1761 - DNA, 19 bp, synthetic construct
  source 1..19: mol_type = other DNA
atcaattactacttgcttc

SEQ ID NO: 1762 - DNA, 19 bp, synthetic construct
  source 1..19: mol_type = other DNA
ttctccatcaattactact

SEQ ID NO: 1763 - DNA, 19 bp, synthetic construct
  source 1..19: mol_type = other DNA
gtttctccatcaattacta

SEQ ID NO: 1764 - DNA, 19 bp, synthetic construct
  source 1..19: mol_type = other DNA
tcgagaatatccaagagac

SEQ ID NO: 1765 - DNA, 19 bp, synthetic construct
  source 1..19: mol_type = other DNA
aaatacacaaagaaagccc

SEQ ID NO: 1766 - DNA, 19 bp, synthetic construct
  source 1..19: mol_type = other DNA
ttatttatggcaaatacac

SEQ ID NO: 1767 - DNA, 19 bp, synthetic construct
  source 1..19: mol_type = other DNA
gatttagtattatttatgg

SEQ ID NO: 1768 - DNA, 19 bp, synthetic construct
  source 1..19: mol_type = other DNA
atcttcaaatgatttagta

SEQ ID NO: 1769 - DNA, 19 bp, synthetic construct
  source 1..19: mol_type = other DNA
atatcttcaaatgatttag

SEQ ID NO: 1770 - DNA, 19 bp, synthetic construct
  source 1..19: mol_type = other DNA
tataatggtgaatatcttc

SEQ ID NO: 1771 - DNA, 19 bp, synthetic construct
  source 1..19: mol_type = other DNA
tctataatggtgaatatct

SEQ ID NO: 1772 - DNA, 19 bp, synthetic construct
  source 1..19: mol_type = other DNA
tctctataatggtgaatat

SEQ ID NO: 1773 - DNA, 19 bp, synthetic construct
  source 1..19: mol_type = other DNA
ttctctataatggtgaata

SEQ ID NO: 1774 - DNA, 19 bp, synthetic construct
  source 1..19: mol_type = other DNA
taatttgttctctataatg

SEQ ID NO: 1775 - DNA, 19 bp, synthetic construct
  source 1..19: mol_type = other DNA
tttaatttgttctctataa

SEQ ID NO: 1776 - DNA, 19 bp, synthetic construct
  source 1..19: mol_type = other DNA
tcttcagagtccttaactc

SEQ ID NO: 1777 - DNA, 19 bp, synthetic construct
  source 1..19: mol_type = other DNA
tttcctactaggaccatag

SEQ ID NO: 1778 - DNA, 19 bp, synthetic construct
  source 1..19: mol_type = other DNA
ttatttcctactaggacca

SEQ ID NO: 1779 - DNA, 19 bp, synthetic construct
  source 1..19: mol_type = other DNA
tttatttcctactaggacc

SEQ ID NO: 1780 - DNA, 19 bp, synthetic construct
  source 1..19: mol_type = other DNA
aatcacatttatttcctac

SEQ ID NO: 1781 - DNA, 19 bp, synthetic construct
  source 1..19: mol_type = other DNA
tctagaaggcaaatcacat

SEQ ID NO: 1782 - DNA, 19 bp, synthetic construct
  source 1..19: mol_type = other DNA
tgtctactgttctagaagg

SEQ ID NO: 1783 - DNA, 19 bp, synthetic construct
  source 1..19: mol_type = other DNA
cttgctaagtcctgagcct

SEQ ID NO: 1784 - DNA, 19 bp, synthetic construct
  source 1..19: mol_type = other DNA
ataacttcttgctaagtcc

SEQ ID NO: 1785 - DNA, 19 bp, synthetic construct
  source 1..19: mol_type = other DNA
aattccataacttcttgct

SEQ ID NO: 1786 - DNA, 19 bp, synthetic construct
  source 1..19: mol_type = other DNA
aataaaaggaattccataa

SEQ ID NO: 1787 - DNA, 19 bp, synthetic construct
  source 1..19: mol_type = other DNA
tttcaataaaaggaattcc

SEQ ID NO: 1788 - DNA, 19 bp, synthetic construct
  source 1..19: mol_type = other DNA
ctgatgtttcaataaaagg

SEQ ID NO: 1789 - DNA, 19 bp, synthetic construct
  source 1..19: mol_type = other DNA
taactttacattcatcagg

SEQ ID NO: 1790 - DNA, 19 bp, synthetic construct
  source 1..19: mol_type = other DNA
tatctttattaaattctcc

SEQ ID NO: 1791 - DNA, 19 bp, synthetic construct
  source 1..19: mol_type = other DNA
aatctagttatgactattc

SEQ ID NO: 1792 - DNA, 21 bp, synthetic construct
  modified_base 1: mod_base = OTHER; note = adenosine
  modified_base 2: mod_base = cm
  modified_base 3: mod_base = OTHER; note = 2'-O-methylthymidine
  modified_base 4: mod_base = OTHER; note = 2'-O-methylthymidine
  modified_base 5: mod_base = OTHER; note = guanosine
  modified_base 6: mod_base = OTHER; note = 2'-O-methylthymidine
  modified_base 7: mod_base = OTHER; note = guanosine
  modified_base 8: mod_base = OTHER; note = guanosine
  modified_base 9: mod_base = OTHER; note = 2'-O-methylthymidine
  modified_base 10: mod_base = OTHER; note = adenosine
  modified_base 11: mod_base = OTHER; note = guanosine
  modified_base 12: mod_base = OTHER; note = 2'-O-methylthymidine
  modified_base 13: mod_base = OTHER; note = 2'-O-methylthymidine
  modified_base 14: mod_base = OTHER; note = guanosine
  modified_base 15: mod_base = OTHER; note = guanosine
  modified_base 16: mod_base = OTHER; note = adenosine
  modified_base 17: mod_base = OTHER; note = guanosine
  modified_base 18: mod_base = cm
  modified_base 19: mod_base = OTHER; note = 2'-O-methylthymidine
  modified_base 20: mod_base = OTHER; note = 2'-O-methylthymidine
  modified_base 21: mod_base = OTHER; note = 2'-O-methylthymidine
  source 1..21: mol_type = other DNA
acttgtggtagttggagcttt

SEQ ID NO: 1793 - DNA, 21 bp, synthetic construct
  modified_base 1: mod_base = OTHER; note = guanosine
  modified_base 2: mod_base = cm
  modified_base 3: mod_base = OTHER; note = adenosine
  modified_base 4: mod_base = OTHER; note = adenosine
  modified_base 5: mod_base = OTHER; note = guanosine
  modified_base 6: mod_base = OTHER; note = adenosine
  modified_base 7: mod_base = OTHER; note = guanosine
  modified_base 8: mod_base = OTHER; note = 2'-O-methylthymidine
  modified_base 9: mod_base = OTHER; note = guanosine
  modified_base 10: mod_base = cm
  modified_base 11: mod_base = cm
  modified_base 12: mod_base = OTHER; note = 2'-O-methylthymidine
  modified_base 13: mod_base = OTHER; note = 2'-O-methylthymidine
  modified_base 14: mod_base = OTHER; note = guanosine
  modified_base 15: mod_base = OTHER; note = adenosine
  modified_base 16: mod_base = cm
  modified_base 17: mod_base = OTHER; note = guanosine
  modified_base 18: mod_base = OTHER; note = adenosine
  modified_base 19: mod_base = OTHER; note = 2'-O-methylthymidine
  modified_base 20: mod_base = OTHER; note = 2'-O-methylthymidine
  modified_base 21: mod_base = OTHER; note = 2'-O-methylthymidine
  source 1..21: mol_type = other DNA
gcaagagtgccttgacgattt

SEQ ID NO: 1794 - DNA, 21 bp, synthetic construct
  modified_base 1: mod_base = cm
  modified_base 2: mod_base = OTHER; note = adenosine
  modified_base 3: mod_base = OTHER; note = adenosine
  modified_base 4: mod_base = OTHER; note = guanosine
  modified_base 5: mod_base = OTHER; note = adenosine
  modified_base 6: mod_base = OTHER; note = guanosine
  modified_base 7: mod_base = OTHER; note = 2'-O-methylthymidine
  modified_base 8: mod_base = OTHER; note = guanosine
  modified_base 9: mod_base = cm
  modified_base 10: mod_base = cm
  modified_base 11: mod_base = OTHER; note = 2'-O-methylthymidine
  modified_base 12: mod_base = OTHER; note = 2'-O-methylthymidine
  modified_base 13: mod_base = OTHER; note = guanosine
  modified_base 14: mod_base = OTHER; note = adenosine
  modified_base 15: mod_base = cm
  modified_base 16: mod_base = OTHER; note = guanosine
  modified_base 17: mod_base = OTHER; note = adenosine
  modified_base 18: mod_base = OTHER; note = 2'-O-methylthymidine
  modified_base 19: mod_base = OTHER; note = adenosine
  modified_base 20: mod_base = OTHER; note = 2'-O-methylthymidine
  modified_base 21: mod_base = OTHER; note = 2'-O-methylthymidine
  source 1..21: mol_type = other DNA
caagagtgccttgacgatatt

SEQ ID NO: 1795 - DNA, 21 bp, synthetic construct
  modified_base 1: mod_base = cm
  modified_base 2: mod_base = cm
  modified_base 3: mod_base = OTHER; note = 2'-O-methylthymidine
  modified_base 4: mod_base = OTHER; note = 2'-O-methylthymidine
  modified_base 5: mod_base = OTHER; note = guanosine
  modified_base 6: mod_base = OTHER; note = adenosine
  modified_base 7: mod_base = cm
  modified_base 8: mod_base = OTHER; note = guanosine
  modified_base 9: mod_base = OTHER; note = adenosine
  modified_base 10: mod_base = OTHER; note = 2'-O-methylthymidine
  modified_base 11: mod_base = OTHER; note = adenosine
  modified_base 12: mod_base = cm
  modified_base 13: mod_base = OTHER; note = adenosine
  modified_base 14: mod_base = OTHER; note = guanosine
  modified_base 15: mod_base = cm
  modified_base 16: mod_base = OTHER; note = 2'-O-methylthymidine
  modified_base 17: mod_base = OTHER; note = adenosine
  modified_base 18: mod_base = OTHER; note = adenosine
  modified_base 19: mod_base = OTHER; note = 2'-O-methylthymidine
  modified_base 20: mod_base = OTHER; note = 2'-O-methylthymidine
  modified_base 21: mod_base = OTHER; note = 2'-O-methylthymidine
  source 1..21: mol_type = other DNA
ccttgacgatacagctaattt

SEQ ID NO: 1796 - DNA, 21 bp, synthetic construct
  modified_base 1: mod_base = cm
  modified_base 2: mod_base = OTHER; note = adenosine
  modified_base 3: mod_base = OTHER; note = guanosine
  modified_base 4: mod_base = cm
  modified_base 5: mod_base = OTHER; note = 2'-O-methylthymidine
  modified_base 6: mod_base = OTHER; note = adenosine
  modified_base 7: mod_base = OTHER; note = adenosine
  modified_base 8: mod_base = OTHER; note = 2'-O-methylthymidine
  modified_base 9: mod_base = OTHER; note = 2'-O-methylthymidine
  modified_base 10: mod_base = cm
  modified_base 11: mod_base = OTHER; note = adenosine
  modified_base 12: mod_base = OTHER; note = guanosine
  modified_base 13: mod_base = OTHER; note = adenosine
  modified_base 14: mod_base = OTHER; note = adenosine
  modified_base 15: mod_base = OTHER; note = 2'-O-methylthymidine
  modified_base 16: mod_base = cm
  modified_base 17: mod_base = OTHER; note = adenosine
  modified_base 18: mod_base = OTHER; note = 2'-O-methylthymidine
  modified_base 19: mod_base = OTHER; note = 2'-O-methylthymidine
  modified_base 20: mod_base = OTHER; note = 2'-O-methylthymidine
  modified_base 21: mod_base = OTHER; note = 2'-O-methylthymidine
  source 1..21: mol_type = other DNA
cagctaattcagaatcatttt

SEQ ID NO: 1797 - DNA, 21 bp, synthetic construct
  modified_base 1: mod_base = cm
  modified_base 2: mod_base = OTHER; note = guanosine
  modified_base 3: mod_base = OTHER; note = adenosine
  modified_base 4: mod_base = OTHER; note = adenosine
  modified_base 5: mod_base = OTHER; note = 2'-O-methylthymidine
  modified_base 6: mod_base = OTHER; note = adenosine
  modified_base 7: mod_base = OTHER; note = 2'-O-methylthymidine
  modified_base 8: mod_base = OTHER; note = guanosine
  modified_base 9: mod_base = OTHER; note = adenosine
  modified_base 10: mod_base = OTHER; note = 2'-O-methylthymidine
  modified_base 11: mod_base = cm
  modified_base 12: mod_base = cm
  modified_base 13: mod_base = OTHER; note = adenosine
  modified_base 14: mod_base = OTHER; note = adenosine
  modified_base 15: mod_base = cm
  modified_base 16: mod_base = OTHER; note = adenosine
  modified_base 17: mod_base = OTHER; note = adenosine
  modified_base 18: mod_base = OTHER; note = 2'-O-methylthymidine
  modified_base 19: mod_base = OTHER; note = adenosine
  modified_base 20: mod_base = OTHER; note = 2'-O-methylthymidine
  modified_base 21: mod_base = OTHER; note = 2'-O-methylthymidine
  source 1..21: mol_type = other DNA
cgaatatgatccaacaatatt

SEQ ID NO: 1798 - DNA, 21 bp, synthetic construct
  modified_base 1: mod_base = OTHER; note = guanosine
  modified_base 2: mod_base = OTHER; note = guanosine
  modified_base 3: mod_base = OTHER; note = adenosine
  modified_base 4: mod_base = OTHER; note = adenosine
  modified_base 5: mod_base = OTHER; note = guanosine
  modified_base 6: mod_base = cm
  modified_base 7: mod_base = OTHER; note = adenosine
  modified_base 8: mod_base = OTHER; note = adenosine
  modified_base 9: mod_base = OTHER; note = guanosine
  modified_base 10: mod_base = OTHER; note = 2'-O-methylthymidine
  modified_base 11: mod_base = OTHER; note = adenosine
  modified_base 12: mod_base = OTHER; note = guanosine
  modified_base 13: mod_base = OTHER; note = 2'-O-methylthymidine
  modified_base 14: mod_base = OTHER; note = adenosine
  modified_base 15: mod_base = OTHER; note = adenosine
  modified_base 16: mod_base = OTHER; note = 2'-O-methylthymidine
  modified_base 17: mod_base = OTHER; note = 2'-O-methylthymidine
  modified_base 18: mod_base = OTHER; note = guanosine
  modified_base 19: mod_base = OTHER; note = adenosine
  modified_base 20: mod_base = OTHER; note = 2'-O-methyluridine
  modified_base 21: mod_base = OTHER; note = 2'-O-methyluridine
  source 1..21: mol_type = other DNA
ggaagcaagtagtaattgatt

SEQ ID NO: 1799 - DNA, 21 bp, synthetic construct
  modified_base 1: mod_base = OTHER; note = guanosine
  modified_base 2: mod_base = OTHER; note = adenosine
  modified_base 3: mod_base = OTHER; note = adenosine
  modified_base 4: mod_base = OTHER; note = guanosine
  modified_base 5: mod_base = cm
  modified_base 6: mod_base = OTHER; note = adenosine
  modified_base 7: mod_base = OTHER; note = adenosine
  modified_base 8: mod_base = OTHER; note = guanosine
  modified_base 9: mod_base = OTHER; note = 2'-O-methylthymidine
  modified_base 10: mod_base = OTHER; note = adenosine
  modified_base 11: mod_base = OTHER; note = guanosine
  modified_base 12: mod_base = OTHER; note = 2'-O-methylthymidine
  modified_base 13: mod_base = OTHER; note = adenosine
  modified_base 14: mod_base = OTHER; note = adenosine
  modified_base 15: mod_base = OTHER; note = 2'-O-methylthymidine
  modified_base 16: mod_base = OTHER; note = 2'-O-methylthymidine
  modified_base 17: mod_base = OTHER; note = guanosine
  modified_base 18: mod_base = OTHER; note = adenosine
  modified_base 19: mod_base = OTHER; note = 2'-O-methylthymidine
  modified_base 20: mod_base = OTHER; note = 2'-O-methyluridine
  modified_base 21: mod_base = OTHER; note = 2'-O-methyluridine
  source 1..21: mol_type = other DNA
gaagcaagtagtaattgattt

SEQ ID NO: 1800 - DNA, 21 bp, synthetic construct
  modified_base 1: mod_base = OTHER; note = adenosine
  modified_base 2: mod_base = OTHER; note = guanosine
  modified_base 3: mod_base = OTHER; note = 2'-O-methylthymidine
  modified_base 4: mod_base = OTHER; note = adenosine
  modified_base 5: mod_base = OTHER; note = guanosine
  modified_base 6: mod_base = OTHER; note = 2'-O-methylthymidine
  modified_base 7: mod_base = OTHER; note = adenosine
  modified_base 8: mod_base = OTHER; note = adenosine
  modified_base 9: mod_base = OTHER; note = 2'-O-methylthymidine
  modified_base 10: mod_base = OTHER; note = 2'-O-methylthymidine
  modified_base 11: mod_base = OTHER; note = guanosine
  modified_base 12: mod_base = OTHER; note = adenosine
  modified_base 13: mod_base = OTHER; note = 2'-O-methylthymidine
  modified_base 14: mod_base = OTHER; note = guanosine
  modified_base 15: mod_base = OTHER; note = guanosine
  modified_base 16: mod_base = OTHER; note = adenosine
  modified_base 17: mod_base = OTHER; note = guanosine
  modified_base 18: mod_base = OTHER; note = adenosine
  modified_base 19: mod_base = OTHER; note = adenosine
  modified_base 20: mod_base = OTHER; note = 2'-O-methylthymidine
  modified_base 21: mod_base = OTHER; note = 2'-O-methylthymidine
  source 1..21: mol_type = other DNA
agtagtaattgatggagaatt

SEQ ID NO: 1801 - DNA, 21 bp, synthetic construct
  modified_base 1: mod_base = OTHER; note = 2'-O-methylthymidine
  modified_base 2: mod_base = OTHER; note = adenosine
  modified_base 3: mod_base = OTHER; note = guanosine
  modified_base 4: mod_base = OTHER; note = 2'-O-methylthymidine
  modified_base 5: mod_base = OTHER; note = adenosine
  modified_base 6: mod_base = OTHER; note = adenosine
  modified_base 7: mod_base = OTHER; note = 2'-O-methylthymidine
  modified_base 8: mod_base = OTHER; note = 2'-O-methylthymidine
  modified_base 9: mod_base = OTHER; note = guanosine
  modified_base 10: mod_base = OTHER; note = adenosine
  modified_base 11: mod_base = OTHER; note = 2'-O-methylthymidine
  modified_base 12: mod_base = OTHER; note = guanosine
  modified_base 13: mod_base = OTHER; note = guanosine
  modified_base 14: mod_base = OTHER; note = adenosine
  modified_base 15: mod_base = OTHER; note = guanosine
  modified_base 16: mod_base = OTHER; note = adenosine
  modified_base 17: mod_base = OTHER; note = adenosine
  modified_base 18: mod_base = OTHER; note = adenosine
  modified_base 19: mod_base = cm
  modified_base 20: mod_base = OTHER; note = 2'-O-methylthymidine
  modified_base 21: mod_base = OTHER; note = 2'-O-methylthymidine
  source 1..21: mol_type = other DNA
tagtaattgatggagaaactt

SEQ ID NO: 1802 - DNA, 21 bp, synthetic construct
  modified_base 1: mod_base = OTHER; note = guanosine
  modified_base 2: mod_base = OTHER; note = 2'-O-methylthymidine
  modified_base 3: mod_base = cm
  modified_base 4: mod_base = OTHER; note = 2'-O-methylthymidine
  modified_base 5: mod_base = cm
  modified_base 6: mod_base = OTHER; note = 2'-O-methylthymidine
  modified_base 7: mod_base = OTHER; note = 2'-O-methylthymidine
  modified_base 8: mod_base = OTHER; note = guanosine
  modified_base 9: mod_base = OTHER; note = guanosine
  modified_base 10: mod_base = OTHER; note = adenosine
  modified_base 11: mod_base = OTHER; note = 2'-O-methylthymidine
  modified_base 12: mod_base = OTHER; note = adenosine
  modified_base 13: mod_base = OTHER; note = 2'-O-methylthymidine
  modified_base 14: mod_base = OTHER; note = 2'-O-methylthymidine
  modified_base 15: mod_base = cm
  modified_base 16: mod_base = OTHER; note = 2'-O-methylthymidine
  modified_base 17: mod_base = cm
  modified_base 18: mod_base = OTHER; note = guanosine
  modified_base 19: mod_base = OTHER; note = adenosine
  modified_base 20: mod_base = OTHER; note = 2'-O-methylthymidine
  modified_base 21: mod_base = OTHER; note = 2'-O-methylthymidine
  source 1..21: mol_type = other DNA
gtctcttggatattctcgatt

SEQ ID NO: 1803 - DNA, 21 bp, synthetic construct
  modified_base 1: mod_base = OTHER; note = guanosine
  modified_base 2: mod_base = OTHER; note = guanosine
  modified_base 3: mod_base = OTHER; note = guanosine
  modified_base 4: mod_base = cm
  modified_base 5: mod_base = OTHER; note = 2'-O-methylthymidine
  modified_base 6: mod_base = OTHER; note = 2'-O-methylthymidine
  modified_base 7: mod_base = OTHER; note = 2'-O-methylthymidine
  modified_base 8: mod_base = cm
  modified_base 9: mod_base = OTHER; note = 2'-O-methylthymidine
  modified_base 10: mod_base = OTHER; note = 2'-O-methylthymidine
  modified_base 11: mod_base = OTHER; note = 2'-O-methylthymidine
  modified_base 12: mod_base = OTHER; note = guanosine
  modified_base 13: mod_base = OTHER; note = 2'-O-methylthymidine
  modified_base 14: mod_base = OTHER; note = guanosine
  modified_base 15: mod_base = OTHER; note = 2'-O-methylthymidine
  modified_base 16: mod_base = OTHER; note = adenosine
  modified_base 17: mod_base = OTHER; note = 2'-O-methylthymidine
  modified_base 18: mod_base = OTHER; note = 2'-O-methylthymidine
  modified_base 19: mod_base = OTHER; note = 2'-O-methylthymidine
  modified_base 20: mod_base = OTHER; note = 2'-O-methylthymidine
  modified_base 21: mod_base = OTHER; note = 2'-O-methylthymidine
  source 1..21: mol_type = other DNA
gggctttctttgtgtattttt

SEQ ID NO: 1804 - DNA, 21 bp, synthetic construct
  modified_base 1: mod_base = OTHER; note = guanosine
  modified_base 2: mod_base = OTHER; note = 2'-O-methylthymidine
  modified_base 3: mod_base = OTHER; note = guanosine
  modified_base 4: mod_base = OTHER; note = 2'-O-methylthymidine
  modified_base 5: mod_base = OTHER; note = adenosine
  modified_base 6: mod_base = OTHER; note = 2'-O-methylthymidine
  modified_base 7: mod_base = OTHER; note = 2'-O-methylthymidine
  modified_base 8: mod_base = OTHER; note = 2'-O-methylthymidine
  modified_base 9: mod_base = OTHER; note = guanosine
  modified_base 10: mod_base = cm
  modified_base 11: mod_base = cm
  modified_base 12: mod_base = OTHER; note = adenosine
  modified_base 13: mod_base = OTHER; note = 2'-O-methylthymidine
  modified_base 14: mod_base = OTHER; note = adenosine
  modified_base 15: mod_base = OTHER; note = adenosine
  modified_base 16: mod_base = OTHER; note = adenosine
  modified_base 17: mod_base = OTHER; note = 2'-O-methylthymidine
  modified_base 18: mod_base = OTHER; note = adenosine
  modified_base 19: mod_base = OTHER; note = adenosine
  modified_base 20: mod_base = OTHER; note = 2'-O-methylthymidine
  modified_base 21: mod_base = OTHER; note = 2'-O-methylthymidine
  source 1..21: mol_type = other DNA
gtgtatttgccataaataatt

SEQ ID NO: 1805 - DNA, 21 bp, synthetic construct
  modified_base 1: mod_base = cm
  modified_base 2: mod_base = cm
  modified_base 3: mod_base = OTHER; note = adenosine
  modified_base 4: mod_base = OTHER; note = 2'-O-methylthymidine
  modified_base 5: mod_base = OTHER; note = adenosine
  modified_base 6: mod_base = OTHER; note = adenosine
  modified_base 7: mod_base = OTHER; note = adenosine
  modified_base 8: mod_base = OTHER; note = 2'-O-methylthymidine
  modified_base 9: mod_base = OTHER; note = adenosine
  modified_base 10: mod_base = OTHER; note = adenosine
  modified_base 11: mod_base = OTHER; note = 2'-O-methylthymidine
  modified_base 12: mod_base = OTHER; note = adenosine
  modified_base 13: mod_base = cm
  modified_base 14: mod_base = OTHER; note = 2'-O-methylthymidine
  modified_base 15: mod_base = OTHER; note = adenosine
  modified_base 16: mod_base = OTHER; note = adenosine
  modified_base 17: mod_base = OTHER; note = adenosine
  modified_base 18: mod_base = OTHER; note = 2'-O-methylthymidine
  modified_base 19: mod_base = cm
  modified_base 20: mod_base = OTHER; note = 2'-O-methylthymidine
  modified_base 21: mod_base = OTHER; note = 2'-O-methylthymidine
  source 1..21: mol_type = other DNA
ccataaataatactaaatctt

SEQ ID NO: 1806 - DNA, 21 bp, synthetic construct
  modified_base 1: mod_base = OTHER; note = 2'-O-methylthymidine
  modified_base 2: mod_base = OTHER; note = adenosine
  modified_base 3: mod_base = cm
  modified_base 4: mod_base = OTHER; note = 2'-O-methylthymidine
  modified_base 5: mod_base = OTHER; note = adenosine
  modified_base 6: mod_base = OTHER; note = adenosine
  modified_base 7: mod_base = OTHER; note = adenosine
  modified_base 8: mod_base = OTHER; note = 2'-O-methylthymidine
  modified_base 9: mod_base = cm
  modified_base 10: mod_base = OTHER; note = adenosine
  modified_base 11: mod_base = OTHER; note = 2'-O-methylthymidine
  modified_base 12: mod_base = OTHER; note = 2'-O-methylthymidine
  modified_base 13: mod_base = OTHER; note = 2'-O-methylthymidine
  modified_base 14: mod_base = OTHER; note = guanosine
  modified_base 15: mod_base = OTHER; note = adenosine
  modified_base 16: mod_base = OTHER; note = adenosine
  modified_base 17: mod_base = OTHER; note = guanosine
  modified_base 18: mod_base = OTHER; note = adenosine
  modified_base 19: mod_base = OTHER; note = 2'-O-methylthymidine
  modified_base 20: mod_base = OTHER; note = 2'-O-methylthymidine
  modified_base 21: mod_base = OTHER; note = 2'-O-methylthymidine
  source 1..21: mol_type = other DNA
tactaaatcatttgaagattt

SEQ ID NO: 1807 - DNA, 21 bp, synthetic construct
  modified_base 1: mod_base = cm
  modified_base 2: mod_base = OTHER; note = 2'-O-methylthymidine
  modified_base 3: mod_base = OTHER; note = adenosine
  modified_base 4: mod_base = OTHER; note = adenosine
  modified_base 5: mod_base = OTHER; note = adenosine
  modified_base 6: mod_base = OTHER; note = 2'-O-methylthymidine
  modified_base 7: mod_base = cm
  modified_base 8: mod_base = OTHER; note = adenosine
  modified_base 9: mod_base = OTHER; note = 2'-O-methylthymidine
  modified_base 10: mod_base = OTHER; note = 2'-O-methylthymidine
  modified_base 11: mod_base = OTHER; note = 2'-O-methylthymidine
  modified_base 12: mod_base = OTHER; note = guanosine
  modified_base 13: mod_base = OTHER; note = adenosine
  modified_base 14: mod_base = OTHER; note = adenosine
  modified_base 15: mod_base = OTHER; note = guanosine
  modified_base 16: mod_base = OTHER; note = adenosine
  modified_base 17: mod_base = OTHER; note = 2'-O-methylthymidine
  modified_base 18: mod_base = OTHER; note = adenosine
  modified_base 19: mod_base = OTHER; note = 2'-O-methylthymidine
  modified_base 20: mod_base = OTHER; note = 2'-O-methyluridine
  modified_base 21: mod_base = OTHER; note = 2'-O-methyluridine
  source 1..21: mol_type = other DNA
ctaaatcatttgaagatattt

SEQ ID NO: 1808 - DNA, 21 bp, synthetic construct
  modified_base 1: mod_base = OTHER; note = guanosine
  modified_base 2: mod_base = OTHER; note = adenosine
  modified_base 3: mod_base = OTHER; note = adenosine
  modified_base 4: mod_base = OTHER; note = guanosine
  modified_base 5: mod_base = OTHER; note = adenosine
  modified_base 6: mod_base = OTHER; note = 2'-O-methylthymidine
  modified_base 7: mod_base = OTHER; note = adenosine
  modified_base 8: mod_base = OTHER; note = 2'-O-methylthymidine
  modified_base 9: mod_base = OTHER; note = 2'-O-methylthymidine
  modified_base 10: mod_base = cm
  modified_base 11: mod_base = OTHER; note = adenosine
  modified_base 12: mod_base = cm
  modified_base 13: mod_base = cm
  modified_base 14: mod_base = OTHER; note = adenosine
  modified_base 15: mod_base = OTHER; note = 2'-O-methylthymidine
  modified_base 16: mod_base = OTHER; note = 2'-O-methylthymidine
  modified_base 17: mod_base = OTHER; note = adenosine
  modified_base 18: mod_base = OTHER; note = 2'-O-methylthymidine
  modified_base 19: mod_base = OTHER; note = adenosine
  modified_base 20: mod_base = OTHER; note = 2'-O-methylthymidine
  modified_base 21: mod_base = OTHER; note = 2'-O-methylthymidine
  source 1..21: mol_type = other DNA
gaagatattcaccattatatt

SEQ ID NO: 1809 - DNA, 21 bp, synthetic construct
  modified_base 1: mod_base = OTHER; note = adenosine
  modified_base 2: mod_base = OTHER; note = guanosine
  modified_base 3: mod_base = OTHER; note = adenosine
  modified_base 4: mod_base = OTHER; note = 2'-O-methylthymidine
  modified_base 5: mod_base = OTHER; note = adenosine
  modified_base 6: mod_base = OTHER; note = 2'-O-methylthymidine
  modified_base 7: mod_base = OTHER; note = 2'-O-methylthymidine
  modified_base 8: mod_base = cm
  modified_base 9: mod_base = OTHER; note = adenosine
  modified_base 10: mod_base = cm
  modified_base 11: mod_base = cm
  modified_base 12: mod_base = OTHER; note = adenosine
  modified_base 13: mod_base = OTHER; note = 2'-O-methylthymidine
  modified_base 14: mod_base = OTHER; note = 2'-O-methylthymidine
  modified_base 15: mod_base = OTHER; note = adenosine
  modified_base 16: mod_base = OTHER; note = 2'-O-methylthymidine
  modified_base 17: mod_base = OTHER; note = adenosine
  modified_base 18: mod_base = OTHER; note = guanosine
  modified_base 19: mod_base = OTHER; note = adenosine
  modified_base 20: mod_base = OTHER; note = 2'-O-methylthymidine
  modified_base 21: mod_base = OTHER; note = 2'-O-methylthymidine
  source 1..21: mol_type = other DNA
agatattcaccattatagatt

SEQ ID NO: 1810 - DNA, 21 bp, synthetic construct
  modified_base 1: mod_base = OTHER; note = adenosine
  modified_base 2: mod_base = OTHER; note = 2'-O-methylthymidine
  modified_base 3: mod_base = OTHER; note = adenosine
  modified_base 4: mod_base = OTHER; note = 2'-O-methylthymidine
  modified_base 5: mod_base = OTHER; note = 2'-O-methylthymidine
  modified_base 6: mod_base = cm
  modified_base 7: mod_base = OTHER; note = adenosine
  modified_base 8: mod_base = cm
  modified_base 9: mod_base = cm
  modified_base 10: mod_base = OTHER; note = adenosine
  modified_base 11: mod_base = OTHER; note = 2'-O-methylthymidine
  modified_base 12: mod_base = OTHER; note = 2'-O-methylthymidine
  modified_base 13: mod_base = OTHER; note = adenosine
  modified_base 14: mod_base = OTHER; note = 2'-O-methylthymidine
  modified_base 15: mod_base = OTHER; note = adenosine
  modified_base 16: mod_base = OTHER; note = guanosine
  modified_base 17: mod_base = OTHER; note = adenosine
  modified_base 18: mod_base = OTHER; note = guanosine
  modified_base 19: mod_base = OTHER; note = adenosine
  modified_base 20: mod_base = OTHER; note = 2'-O-methylthymidine
  modified_base 21: mod_base = OTHER; note = 2'-O-methylthymidine
  source 1..21: mol_type = other DNA
atattcaccattatagagatt

SEQ ID NO: 1811 - DNA, 21 bp, synthetic construct
  modified_base 1: mod_base = OTHER; note = 2'-O-methylthymidine
  modified_base 2: mod_base = OTHER; note = adenosine
  modified_base 3: mod_base = OTHER; note = 2'-O-methylthymidine
  modified_base 4: mod_base = OTHER; note = 2'-O-methylthymidine
  modified_base 5: mod_base = cm
  modified_base 6: mod_base = OTHER; note = adenosine
  modified_base 7: mod_base = cm
  modified_base 8: mod_base = cm
  modified_base 9: mod_base = OTHER; note = adenosine
  modified_base 10: mod_base = OTHER; note = 2'-O-methylthymidine
  modified_base 11: mod_base = OTHER; note = 2'-O-methylthymidine
  modified_base 12: mod_base = OTHER; note = adenosine
  modified_base 13: mod_base = OTHER; note = 2'-O-methylthymidine
  modified_base 14: mod_base = OTHER; note = adenosine
  modified_base 15: mod_base = OTHER; note = guanosine
  modified_base 16: mod_base = OTHER; note = adenosine
  modified_base 17: mod_base = OTHER; note = guanosine
  modified_base 18: mod_base = OTHER; note = adenosine
  modified_base 19: mod_base = OTHER; note = adenosine
  modified_base 20: mod_base = OTHER; note = 2'-O-methylthymidine
  modified_base 21: mod_base = OTHER; note = 2'-O-methylthymidine
  source 1..21: mol_type = other DNA
tattcaccattatagagaatt

SEQ ID NO: 1812 - DNA, 21 bp, synthetic construct
  modified_base 1: mod_base = cm
  modified_base 2: mod_base = OTHER; note = adenosine
  modified_base 3: mod_base = OTHER; note = 2'-O-methylthymidine
  modified_base 4: mod_base = OTHER; note = 2'-O-methylthymidine
  modified_base 5: mod_base = OTHER; note = adenosine
  modified_base 6: mod_base = OTHER; note = 2'-O-methylthymidine
  modified_base 7: mod_base = OTHER; note = adenosine
  modified_base 8: mod_base = OTHER; note = guanosine
  modified_base 9: mod_base = OTHER; note = adenosine
  modified_base 10: mod_base = OTHER; note = guanosine
  modified_base 11: mod_base = OTHER; note = adenosine
  modified_base 12: mod_base = OTHER; note = adenosine
  modified_base 13: mod_base = cm
  modified_base 14: mod_base = OTHER; note = adenosine
  modified_base 15: mod_base = OTHER; note = adenosine
  modified_base 16: mod_base = OTHER; note = adenosine
  modified_base 17: mod_base = OTHER; note = 2'-O-methylthymidine
  modified_base 18: mod_base = OTHER; note = 2'-O-methylthymidine
  modified_base 19: mod_base = OTHER; note = adenosine
  modified_base 20: mod_base = OTHER; note = 2'-O-methylthymidine
  modified_base 21: mod_base = OTHER; note = 2'-O-methylthymidine
  source 1..21: mol_type = other DNA
cattatagagaacaaattatt

SEQ ID NO: 1813 - DNA, 21 bp, synthetic construct
  modified_base 1: mod_base = OTHER; note = 2'-O-methylthymidine
  modified_base 2: mod_base = OTHER; note = 2'-O-methylthymidine
  modified_base 3: mod_base = OTHER; note = adenosine
  modified_base 4: mod_base = OTHER; note = 2'-O-methylthymidine
  modified_base 5: mod_base = OTHER; note = adenosine
  modified_base 6: mod_base = OTHER; note = guanosine
  modified_base 7: mod_base = OTHER; note = adenosine
  modified_base 8: mod_base = OTHER; note = guanosine
  modified_base 9: mod_base = OTHER; note = adenosine
  modified_base 10: mod_base = OTHER; note = adenosine
  modified_base 11: mod_base = cm
  modified_base 12: mod_base = OTHER; note = adenosine
  modified_base 13: mod_base = OTHER; note = adenosine
  modified_base 14: mod_base = OTHER; note = adenosine
  modified_base 15: mod_base = OTHER; note = 2'-O-methylthymidine
  modified_base 16: mod_base = OTHER; note = 2'-O-methylthymidine
  modified_base 17: mod_base = OTHER; note = adenosine
  modified_base 18: mod_base = OTHER; note = adenosine
  modified_base 19: mod_base = OTHER; note = adenosine
  modified_base 20: mod_base = OTHER; note = 2'-O-methylthymidine
  modified_base 21: mod_base = OTHER; note = 2'-O-methylthymidine
  source 1..21: mol_type = other DNA
ttatagagaacaaattaaatt

SEQ ID NO: 1814 - DNA, 21 bp, synthetic construct
  modified_base 1: mod_base = OTHER; note = guanosine
  modified_base 2: mod_base = OTHER; note = adenosine
  modified_base 3: mod_base = OTHER; note = guanosine
  modified_base 4: mod_base = OTHER; note = 2'-O-methylthymidine
  modified_base 5: mod_base = OTHER; note = 2'-O-methylthymidine
  modified_base 6: mod_base = OTHER; note = adenosine
  modified_base 7: mod_base = OTHER; note = adenosine
  modified_base 8: mod_base = OTHER; note = guanosine
  modified_base 9: mod_base = OTHER; note = guanosine
  modified_base 10: mod_base = OTHER; note = adenosine
  modified_base 11: mod_base = cm
  modified_base 12: mod_base = OTHER; note = 2'-O-methylthymidine
  modified_base 13: mod_base = cm
  modified_base 14: mod_base = OTHER; note = 2'-O-methylthymidine
  modified_base 15: mod_base = OTHER; note = guanosine
  modified_base 16: mod_base = OTHER; note = adenosine
  modified_base 17: mod_base = OTHER; note = adenosine
  modified_base 18: mod_base = OTHER; note = guanosine
  modified_base 19: mod_base = OTHER; note = adenosine
  modified_base 20: mod_base = OTHER; note = 2'-O-methylthymidine
  modified_base 21: mod_base = OTHER; note = 2'-O-methylthymidine
  source 1..21: mol_type = other DNA
gagttaaggactctgaagatt

SEQ ID NO: 1815 - DNA, 21 bp, synthetic construct
  modified_base 1: mod_base = cm
  modified_base 2: mod_base = OTHER; note = 2'-O-methylthymidine
  modified_base 3: mod_base = OTHER; note = adenosine
  modified_base 4: mod_base = OTHER; note = 2'-O-methylthymidine
  modified_base 5: mod_base = OTHER; note = guanosine
  modified_base 6: mod_base = OTHER; note = guanosine
  modified_base 7: mod_base = OTHER; note = 2'-O-methylthymidine
  modified_base 8: mod_base = cm
  modified_base 9: mod_base = cm
  modified_base 10: mod_base = OTHER; note = 2'-O-methylthymidine
  modified_base 11: mod_base = OTHER; note = adenosine
  modified_base 12: mod_base = OTHER; note = guanosine
  modified_base 13: mod_base = OTHER; note = 2'-O-methylthymidine
  modified_base 14: mod_base = OTHER; note = adenosine
  modified_base 15: mod_base = OTHER; note = guanosine
  modified_base 16: mod_base = OTHER; note = guanosine
  modified_base 17: mod_base = OTHER; note = adenosine
  modified_base 18: mod_base = OTHER; note = adenosine
  modified_base 19: mod_base = OTHER; note = adenosine
  modified_base 20: mod_base = OTHER; note = 2'-O-methyluridine
  modified_base 21: mod_base = OTHER; note = 2'-O-methyluridine
  source 1..21: mol_type = other DNA
ctatggtcctagtaggaaatt

SEQ ID NO: 1816 - DNA, 21 bp, synthetic construct
  modified_base 1: mod_base = OTHER; note = 2'-O-methylthymidine
  modified_base 2: mod_base = OTHER; note = guanosine
  modified_base 3: mod_base = OTHER; note = guanosine
  modified_base 4: mod_base = OTHER; note = 2'-O-methylthymidine
  modified_base 5: mod_base = cm
  modified_base 6: mod_base = cm
  modified_base 7: mod_base = OTHER; note = 2'-O-methylthymidine
  modified_base 8: mod_base = OTHER; note = adenosine
  modified_base 9: mod_base = OTHER; note = guanosine
  modified_base 10: mod_base = OTHER; note = 2'-O-methylthymidine
  modified_base 11: mod_base = OTHER; note = adenosine
  modified_base 12: mod_base = OTHER; note = guanosine
  modified_base 13: mod_base = OTHER; note = guanosine
  modified_base 14: mod_base = OTHER; note = adenosine
  modified_base 15: mod_base = OTHER; note = adenosine
  modified_base 16: mod_base = OTHER; note = adenosine
  modified_base 17: mod_base = OTHER; note = 2'-O-methylthymidine
  modified_base 18: mod_base = OTHER; note = adenosine
  modified_base 19: mod_base = OTHER; note = adenosine
  modified_base 20: mod_base = OTHER; note = 2'-O-methyluridine
  modified_base 21: mod_base = OTHER; note = 2'-O-methyluridine
  source 1..21: mol_type = other DNA
tggtcctagtaggaaataatt

SEQ ID NO: 1817 - DNA, 21 bp, synthetic construct
  modified_base 1: mod_base = OTHER; note = guanosine
  modified_base 2: mod_base = OTHER; note = guanosine
  modified_base 3: mod_base = OTHER; note = 2'-O-methylthymidine
  modified_base 4: mod_base = cm
  modified_base 5: mod_base = cm
  modified_base 6: mod_base = OTHER; note = 2'-O-methylthymidine
  modified_base 7: mod_base = OTHER; note = adenosine
  modified_base 8: mod_base = OTHER; note = guanosine
  modified_base 9: mod_base = OTHER; note = 2'-O-methylthymidine
  modified_base 10: mod_base = OTHER; note = adenosine
  modified_base 11: mod_base = OTHER; note = guanosine
  modified_base 12: mod_base = OTHER; note = guanosine
  modified_base 13: mod_base = OTHER; note = adenosine
  modified_base 14: mod_base = OTHER; note = adenosine
  modified_base 15: mod_base = OTHER; note = adenosine
  modified_base 16: mod_base = OTHER; note = 2'-O-methylthymidine
  modified_base 17: mod_base = OTHER; note = adenosine
  modified_base 18: mod_base = OTHER; note = adenosine
  modified_base 19: mod_base = OTHER; note = adenosine
  modified_base 20: mod_base = OTHER; note = 2'-O-methylthymidine
  modified_base 21: mod_base = OTHER; note = 2'-O-methylthymidine
  source 1..21: mol_type = other DNA
ggtcctagtaggaaataaatt

SEQ ID NO: 1818 - DNA, 21 bp, synthetic construct
  modified_base 1: mod_base = OTHER; note = guanosine
  modified_base 2: mod_base = OTHER; note = 2'-O-methylthymidine
  modified_base 3: mod_base = OTHER; note = adenosine
  modified_base 4: mod_base = OTHER; note = guanosine
  modified_base 5: mod_base = OTHER; note = guanosine
  modified_base 6: mod_base = OTHER; note = adenosine
  modified_base 7: mod_base = OTHER; note = adenosine
  modified_base 8: mod_base = OTHER; note = adenosine
  modified_base 9: mod_base = OTHER; note = 2'-O-methylthymidine
  modified_base 10: mod_base = OTHER; note = adenosine
  modified_base 11: mod_base = OTHER; note = adenosine
  modified_base 12: mod_base = OTHER; note = adenosine
  modified_base 13: mod_base = OTHER; note = 2'-O-methylthymidine
  modified_base 14: mod_base = OTHER; note = guanosine
  modified_base 15: mod_base = OTHER; note = 2'-O-methylthymidine
  modified_base 16: mod_base = OTHER; note = guanosine
  modified_base 17: mod_base = OTHER; note = adenosine
  modified_base 18: mod_base = OTHER; note = 2'-O-methylthymidine
  modified_base 19: mod_base = OTHER; note = 2'-O-methylthymidine
  modified_base 20: mod_base = OTHER; note = 2'-O-methylthymidine
  modified_base 21: mod_base = OTHER; note = 2'-O-methylthymidine
  source 1..21: mol_type = other DNA
gtaggaaataaatgtgatttt

SEQ ID NO: 1819 - DNA, 21 bp, synthetic construct
  modified_base 1: mod_base = OTHER; note = adenosine
  modified_base 2: mod_base = OTHER; note = 2'-O-methylthymidine
  modified_base 3: mod_base = OTHER; note = guanosine
  modified_base 4: mod_base = OTHER; note = 2'-O-methylthymidine
  modified_base 5: mod_base = OTHER; note = guanosine
  modified_base 6: mod_base = OTHER; note = adenosine
  modified_base 7: mod_base = OTHER; note = 2'-O-methylthymidine
  modified_base 8: mod_base = OTHER; note = 2'-O-methylthymidine
  modified_base 9: mod_base = OTHER; note = 2'-O-methylthymidine
  modified_base 10: mod_base = OTHER; note = guanosine
  modified_base 11: mod_base = cm
  modified_base 12: mod_base = cm
  modified_base 13: mod_base = OTHER; note = 2'-O-methylthymidine
  modified_base 14: mod_base = OTHER; note = 2'-O-methylthymidine
  modified_base 15: mod_base = cm
  modified_base 16: mod_base = OTHER; note = 2'-O-methylthymidine
  modified_base 17: mod_base = OTHER; note = adenosine
  modified_base 18: mod_base = OTHER; note = guanosine
  modified_base 19: mod_base = OTHER; note = adenosine
  modified_base 20: mod_base = OTHER; note = 2'-O-methylthymidine
  modified_base 21: mod_base = OTHER; note = 2'-O-methylthymidine
  source 1..21: mol_type = other DNA
atgtgatttgccttctagatt

SEQ ID NO: 1820 - DNA, 21 bp, synthetic construct
  modified_base 1: mod_base = cm
  modified_base 2: mod_base = cm
  modified_base 3: mod_base = OTHER; note = 2'-O-methylthymidine
  modified_base 4: mod_base = OTHER; note = 2'-O-methylthymidine
  modified_base 5: mod_base = cm
  modified_base 6: mod_base = OTHER; note = 2'-O-methylthymidine
  modified_base 7: mod_base = OTHER; note = adenosine
  modified_base 8: mod_base = OTHER; note = guanosine
  modified_base 9: mod_base = OTHER; note = adenosine
  modified_base 10: mod_base = OTHER; note = adenosine
  modified_base 11: mod_base = cm
  modified_base 12: mod_base = OTHER; note = adenosine
  modified_base 13: mod_base = OTHER; note = guanosine
  modified_base 14: mod_base = OTHER; note = 2'-O-methylthymidine
  modified_base 15: mod_base = OTHER; note = adenosine
  modified_base 16: mod_base = OTHER; note = guanosine
  modified_base 17: mod_base = OTHER; note = adenosine
  modified_base 18: mod_base = cm
  modified_base 19: mod_base = OTHER; note = adenosine
  modified_base 20: mod_base = OTHER; note = 2'-O-methylthymidine
  modified_base 21: mod_base = OTHER; note = 2'-O-methylthymidine
  source 1..21: mol_type = other DNA
ccttctagaacagtagacatt

SEQ ID NO: 1821 - DNA, 21 bp, synthetic construct
  modified_base 1: mod_base = OTHER; note = adenosine
  modified_base 2: mod_base = OTHER; note = guanosine
  modified_base 3: mod_base = OTHER; note = guanosine
  modified_base 4: mod_base = cm
  modified_base 5: mod_base = OTHER; note = 2'-O-methylthymidine
  modified_base 6: mod_base = cm
  modified_base 7: mod_base = OTHER; note = adenosine
  modified_base 8: mod_base = OTHER; note = guanosine
  modified_base 9: mod_base = OTHER; note = guanosine
  modified_base 10: mod_base = OTHER; note = adenosine
  modified_base 11: mod_base = cm
  modified_base 12: mod_base = OTHER; note = 2'-O-methylthymidine
  modified_base 13: mod_base = OTHER; note = 2'-O-methylthymidine
  modified_base 14: mod_base = OTHER; note = adenosine
  modified_base 15: mod_base = OTHER; note = guanosine
  modified_base 16: mod_base = cm
  modified_base 17: mod_base = OTHER; note = adenosine
  modified_base 18: mod_base = OTHER; note = adenosine
  modified_base 19: mod_base = OTHER; note = guanosine
  modified_base 20: mod_base = OTHER; note = 2'-O-methylthymidine
  modified_base 21: mod_base = OTHER; note = 2'-O-methylthymidine
  source 1..21: mol_type = other DNA
aggctcaggacttagcaagtt

SEQ ID NO: 1822 - DNA, 21 bp, synthetic construct
  modified_base 1: mod_base = OTHER; note = guanosine
  modified_base 2: mod_base = OTHER; note = guanosine
  modified_base 3: mod_base = OTHER; note = adenosine
  modified_base 4: mod_base = cm
  modified_base 5: mod_base = OTHER; note = 2'-O-methylthymidine
  modified_base 6: mod_base = OTHER; note = 2'-O-methylthymidine
  modified_base 7: mod_base = OTHER; note = adenosine
  modified_base 8: mod_base = OTHER; note = guanosine
  modified_base 9: mod_base = cm
  modified_base 10: mod_base = OTHER; note = adenosine
  modified_base 11: mod_base = OTHER; note = adenosine
  modified_base 12: mod_base = OTHER; note = guanosine
  modified_base 13: mod_base = OTHER; note = adenosine
  modified_base 14: mod_base = OTHER; note = adenosine
  modified_base 15: mod_base = OTHER; note = guanosine
  modified_base 16: mod_base = OTHER; note = 2'-O-methylthymidine
  modified_base 17: mod_base = OTHER; note = 2'-O-methylthymidine
  modified_base 18: mod_base = OTHER; note = adenosine
  modified_base 19: mod_base = OTHER; note = 2'-O-methylthymidine
  modified_base 20: mod_base = OTHER; note = 2'-O-methylthymidine
  modified_base 21: mod_base = OTHER; note = 2'-O-methylthymidine
  source 1..21: mol_type = other DNA
ggacttagcaagaagttattt

SEQ ID NO: 1823 - DNA, 21 bp, synthetic construct
  modified_base 1: mod_base = OTHER; note = adenosine
  modified_base 2: mod_base = OTHER; note = guanosine
  modified_base 3: mod_base = cm
  modified_base 4: mod_base = OTHER; note = adenosine
  modified_base 5: mod_base = OTHER; note = adenosine
  modified_base 6: mod_base = OTHER; note = guanosine
  modified_base 7: mod_base = OTHER; note = adenosine
  modified_base 8: mod_base = OTHER; note = adenosine
  modified_base 9: mod_base = OTHER; note = guanosine
  modified_base 10: mod_base = OTHER; note = 2'-O-methylthymidine
  modified_base 11: mod_base = OTHER; note = 2'-O-methylthymidine
  modified_base 12: mod_base = OTHER; note = adenosine
  modified_base 13: mod_base = OTHER; note = 2'-O-methylthymidine
  modified_base 14: mod_base = OTHER; note = guanosine
  modified_base 15: mod_base = OTHER; note = guanosine
  modified_base 16: mod_base = OTHER; note = adenosine
  modified_base 17: mod_base = OTHER; note = adenosine
  modified_base 18: mod_base = OTHER; note = 2'-O-methylthymidine
  modified_base 19: mod_base = OTHER; note = 2'-O-methylthymidine
  modified_base 20: mod_base = OTHER; note = 2'-O-methylthymidine
  modified_base 21: mod_base = OTHER; note = 2'-O-methylthymidine
  source 1..21: mol_type = other DNA
agcaagaagttatggaatttt

SEQ ID NO: 1824 - DNA, 21 bp, synthetic construct
  modified_base 1: mod_base = OTHER; note = 2'-O-methylthymidine
  modified_base 2: mod_base = OTHER; note = 2'-O-methylthymidine
  modified_base 3: mod_base = OTHER; note = adenosine
  modified_base 4: mod_base = OTHER; note = 2'-O-methylthymidine
  modified_base 5: mod_base = OTHER; note = guanosine
  modified_base 6: mod_base = OTHER; note = guanosine
  modified_base 7: mod_base = OTHER; note = adenosine
  modified_base 8: mod_base = OTHER; note = adenosine
  modified_base 9: mod_base = OTHER; note = 2'-O-methylthymidine
  modified_base 10: mod_base = OTHER; note = 2'-O-methylthymidine
  modified_base 11: mod_base = cm
  modified_base 12: mod_base = cm
  modified_base 13: mod_base = OTHER; note = 2'-O-methylthymidine
  modified_base 14: mod_base = OTHER; note = 2'-O-methylthymidine
  modified_base 15: mod_base = OTHER; note = 2'-O-methylthymidine
  modified_base 16: mod_base = OTHER; note = 2'-O-methylthymidine
  modified_base 17: mod_base = OTHER; note = adenosine
  modified_base 18: mod_base = OTHER; note = 2'-O-methylthymidine
  modified_base 19: mod_base = OTHER; note = 2'-O-methylthymidine
  modified_base 20: mod_base = OTHER; note = 2'-O-methylthymidine
  modified_base 21: mod_base = OTHER; note = 2'-O-methylthymidine
  source 1..21: mol_type = other DNA
ttatggaattccttttatttt

SEQ ID NO: 1825 - DNA, 21 bp, synthetic construct
  modified_base 1: mod_base = OTHER; note = guanosine
  modified_base 2: mod_base = OTHER; note = guanosine
  modified_base 3: mod_base = OTHER; note = adenosine
  modified_base 4: mod_base = OTHER; note = adenosine
  modified_base 5: mod_base = OTHER; note = 2'-O-methylthymidine
  modified_base 6: mod_base = OTHER; note = 2'-O-methylthymidine
  modified_base 7: mod_base = cm
  modified_base 8: mod_base = cm
  modified_base 9: mod_base = OTHER; note = 2'-O-methylthymidine
  modified_base 10: mod_base = OTHER; note = 2'-O-methylthymidine
  modified_base 11: mod_base = OTHER; note = 2'-O-methylthymidine
  modified_base 12: mod_base = OTHER; note = 2'-O-methylthymidine
  modified_base 13: mod_base = OTHER; note = adenosine
  modified_base 14: mod_base = OTHER; note = 2'-O-methylthymidine
  modified_base 15: mod_base = OTHER; note = 2'-O-methylthymidine
  modified_base 16: mod_base = OTHER; note = guanosine
  modified_base 17: mod_base = OTHER; note = adenosine
  modified_base 18: mod_base = OTHER; note = adenosine
  modified_base 19: mod_base = OTHER; note = adenosine
  modified_base 20: mod_base = OTHER; note = 2'-O-methylthymidine
  modified_base 21: mod_base = OTHER; note = 2'-O-methylthymidine
  source 1..21: mol_type = other DNA
ggaattccttttattgaaatt

SEQ ID NO: 1826 - DNA, 21 bp, synthetic construct
  modified_base 1: mod_base = cm
  modified_base 2: mod_base = cm
  modified_base 3: mod_base = OTHER; note = 2'-O-methylthymidine
  modified_base 4: mod_base = OTHER; note = 2'-O-methylthymidine
  modified_base 5: mod_base = OTHER; note = 2'-O-methylthymidine
  modified_base 6: mod_base = OTHER; note = 2'-O-methylthymidine
  modified_base 7: mod_base = OTHER; note = adenosine
  modified_base 8: mod_base = OTHER; note = 2'-O-methylthymidine
  modified_base 9: mod_base = OTHER; note = 2'-O-methylthymidine
  modified_base 10: mod_base = OTHER; note = guanosine
  modified_base 11: mod_base = OTHER; note = adenosine
  modified_base 12: mod_base = OTHER; note = adenosine
  modified_base 13: mod_base = OTHER; note = adenosine
  modified_base 14: mod_base = cm
  modified_base 15: mod_base = OTHER; note = adenosine
  modified_base 16: mod_base = OTHER; note = 2'-O-methylthymidine
  modified_base 17: mod_base = cm
  modified_base 18: mod_base = OTHER; note = adenosine
  modified_base 19: mod_base = OTHER; note = guanosine
  modified_base 20: mod_base = OTHER; note = 2'-O-methylthymidine
  modified_base 21: mod_base = OTHER; note = 2'-O-methylthymidine
  source 1..21: mol_type = other DNA
ccttttattgaaacatcagtt

SEQ ID NO: 1827 - DNA, 21 bp, synthetic construct
  modified_base 1: mod_base = cm
  modified_base 2: mod_base = cm
  modified_base 3: mod_base = OTHER; note = 2'-O-methylthymidine
  modified_base 4: mod_base = OTHER; note = guanosine
  modified_base 5: mod_base = OTHER; note = adenosine
  modified_base 6: mod_base = OTHER; note = 2'-O-methylthymidine
  modified_base 7: mod_base = OTHER; note = guanosine
  modified_base 8: mod_base = OTHER; note = adenosine
  modified_base 9: mod_base = OTHER; note = adenosine
  modified_base 10: mod_base = OTHER; note = 2'-O-methylthymidine
  modified_base 11: mod_base = OTHER; note = guanosine
  modified_base 12: mod_base = OTHER; note = 2'-O-methylthymidine
  modified_base 13: mod_base = OTHER; note = adenosine
  modified_base 14: mod_base = OTHER; note = adenosine
  modified_base 15: mod_base = OTHER; note = adenosine
  modified_base 16: mod_base = OTHER; note = guanosine
  modified_base 17: mod_base = OTHER; note = 2'-O-methylthymidine
  modified_base 18: mod_base = OTHER; note = 2'-O-methylthymidine
  modified_base 19: mod_base = OTHER; note = adenosine
  modified_base 20: mod_base = OTHER; note = 2'-O-methyluridine
  modified_base 21: mod_base = OTHER; note = 2'-O-methyluridine
  source 1..21: mol_type = other DNA
cctgatgaatgtaaagttatt

SEQ ID NO: 1828 - DNA, 21 bp, synthetic construct
  modified_base 1: mod_base = OTHER; note = guanosine
  modified_base 2: mod_base = OTHER; note = guanosine
  modified_base 3: mod_base = OTHER; note = adenosine
  modified_base 4: mod_base = OTHER; note = guanosine
  modified_base 5: mod_base = OTHER; note = adenosine
  modified_base 6: mod_base = OTHER; note = adenosine
  modified_base 7: mod_base = OTHER; note = 2'-O-methylthymidine
  modified_base 8: mod_base = OTHER; note = 2'-O-methylthymidine
  modified_base 9: mod_base = OTHER; note = 2'-O-methylthymidine
  modified_base 10: mod_base = OTHER; note = adenosine
  modified_base 11: mod_base = OTHER; note = adenosine
  modified_base 12: mod_base = OTHER; note = 2'-O-methylthymidine
  modified_base 13: mod_base = OTHER; note = adenosine
  modified_base 14: mod_base = OTHER; note = adenosine
  modified_base 15: mod_base = OTHER; note = adenosine
  modified_base 16: mod_base = OTHER; note = guanosine
  modified_base 17: mod_base = OTHER; note = adenosine
  modified_base 18: mod_base = OTHER; note = 2'-O-methylthymidine
  modified_base 19: mod_base = OTHER; note = adenosine
  modified_base 20: mod_base = OTHER; note = 2'-O-methyluridine
  modified_base 21: mod_base = OTHER; note = 2'-O-methyluridine
  source 1..21: mol_type = other DNA
ggagaatttaataaagatatt

SEQ ID NO: 1829 - DNA, 21 bp, synthetic construct
  modified_base 1: mod_base = OTHER; note = guanosine
  modified_base 2: mod_base = OTHER; note = adenosine
  modified_base 3: mod_base = OTHER; note = adenosine
  modified_base 4: mod_base = OTHER; note = 2'-O-methylthymidine
  modified_base 5: mod_base = OTHER; note = adenosine
  modified_base 6: mod_base = OTHER; note = guanosine
  modified_base 7: mod_base = OTHER; note = 2'-O-methylthymidine
  modified_base 8: mod_base = cm
  modified_base 9: mod_base = OTHER; note = adenosine
  modified_base 10: mod_base = OTHER; note = 2'-O-methylthymidine
  modified_base 11: mod_base = OTHER; note = adenosine
  modified_base 12: mod_base = OTHER; note = adenosine
  modified_base 13: mod_base = cm
  modified_base 14: mod_base = OTHER; note = 2'-O-methylthymidine
  modified_base 15: mod_base = OTHER; note = adenosine
  modified_base 16: mod_base = OTHER; note = guanosine
  modified_base 17: mod_base = OTHER; note = adenosine
  modified_base 18: mod_base = OTHER; note = 2'-O-methylthymidine
  modified_base 19: mod_base = OTHER; note = 2'-O-methylthymidine
  modified_base 20: mod_base = OTHER; note = 2'-O-methyluridine
  modified_base 21: mod_base = OTHER; note = 2'-O-methyluridine
  source 1..21: mol_type = other DNA
gaatagtcataactagatttt

SEQ ID NO: 1830 - DNA, 21 bp, synthetic construct
  modified_base 1: mod_base = OTHER; note = adenosine
  modified_base 2: mod_base = OTHER; note = guanosine
  modified_base 3: mod_base = OTHER; note = cytidine
  modified_base 4: mod_base = OTHER; note = thymidine
  modified_base 5: mod_base = OTHER; note = cytidine
  modified_base 6: mod_base = cm
  modified_base 7: mod_base = OTHER; note = adenosine
  modified_base 8: mod_base = OTHER; note = adenosine
  modified_base 9: mod_base = OTHER; note = cytidine
  modified_base 10: mod_base = OTHER; note = 2'-O-methylthymidine
  modified_base 11: mod_base = OTHER; note = adenosine
  modified_base 12: mod_base = OTHER; note = cytidine
  modified_base 13: mod_base = cm
  modified_base 14: mod_base = OTHER; note = adenosine
  modified_base 15: mod_base = cm
  modified_base 16: mod_base = OTHER; note = adenosine
  modified_base 17: mod_base = OTHER; note = adenosine
  modified_base 18: mod_base = OTHER; note = guanosine
  modified_base 19: mod_base = OTHER; note = thymidine
  modified_base 20: mod_base = OTHER; note = 2'-O-methylthymidine
  modified_base 21: mod_base = OTHER; note = 2'-O-methylthymidine
  source 1..21: mol_type = other DNA
agctccaactaccacaagttt

SEQ ID NO: 1831 - DNA, 21 bp, synthetic construct
  modified_base 1: mod_base = OTHER; note = adenosine
  modified_base 2: mod_base = OTHER; note = thymidine
  modified_base 3: mod_base = OTHER; note = cytidine
  modified_base 4: mod_base = OTHER; note = guanosine
  modified_base 5: mod_base = OTHER; note = thymidine
  modified_base 6: mod_base = cm
  modified_base 7: mod_base = OTHER; note = adenosine
  modified_base 8: mod_base = OTHER; note = adenosine
  modified_base 9: mod_base = OTHER; note = guanosine
  modified_base 10: mod_base = OTHER; note = guanosine
  modified_base 11: mod_base = cm
  modified_base 12: mod_base = OTHER; note = adenosine
  modified_base 13: mod_base = OTHER; note = cytidine
  modified_base 14: mod_base = OTHER; note = thymidine
  modified_base 15: mod_base = OTHER; note = cytidine
  modified_base 16: mod_base = OTHER; note = thymidine
  modified_base 17: mod_base = OTHER; note = thymidine
  modified_base 18: mod_base = OTHER; note = guanosine
  modified_base 19: mod_base = OTHER; note = cytidine
  modified_base 20: mod_base = OTHER; note = 2'-O-methylthymidine
  modified_base 21: mod_base = OTHER; note = 2'-O-methylthymidine
  source 1..21: mol_type = other DNA
atcgtcaaggcactcttgctt

SEQ ID NO: 1832 - DNA, 21 bp, synthetic construct
  modified_base 1: mod_base = OTHER; note = 2'-O-methylthymidine
  modified_base 2: mod_base = OTHER; note = adenosine
  modified_base 3: mod_base = OTHER; note = thymidine
  modified_base 4: mod_base = OTHER; note = cytidine
  modified_base 5: mod_base = OTHER; note = guanosine
  modified_base 6: mod_base = OTHER; note = thymidine
  modified_base 7: mod_base = cm
  modified_base 8: mod_base = OTHER; note = adenosine
  modified_base 9: mod_base = OTHER; note = adenosine
  modified_base 10: mod_base = OTHER; note = guanosine
  modified_base 11: mod_base = OTHER; note = guanosine
  modified_base 12: mod_base = cm
  modified_base 13: mod_base = OTHER; note = adenosine
  modified_base 14: mod_base = OTHER; note = cytidine
  modified_base 15: mod_base = OTHER; note = thymidine
  modified_base 16: mod_base = OTHER; note = cytidine
  modified_base 17: mod_base = OTHER; note = thymidine
  modified_base 18: mod_base = OTHER; note = thymidine
  modified_base 19: mod_base = OTHER; note = guanosine
  modified_base 20: mod_base = OTHER; note = 2'-O-methylthymidine
  modified_base 21: mod_base = OTHER; note = 2'-O-methylthymidine
  source 1..21: mol_type = other DNA
tatcgtcaaggcactcttgtt

SEQ ID NO: 1833 - DNA, 21 bp, synthetic construct
  modified_base 1: mod_base = OTHER; note = adenosine
  modified_base 2: mod_base = OTHER; note = thymidine
  modified_base 3: mod_base = OTHER; note = 2'-O-methylthymidine
  modified_base 4: mod_base = OTHER; note = adenosine
  modified_base 5: mod_base = OTHER; note = guanosine
  modified_base 6: mod_base = OTHER; note = cytidine
  modified_base 7: mod_base = OTHER; note = thymidine
  modified_base 8: mod_base = OTHER; note = guanosine
  modified_base 9: mod_base = OTHER; note = 2'-O-methylthymidine
  modified_base 10: mod_base = OTHER; note = adenosine
  modified_base 11: mod_base = OTHER; note = thymidine
  modified_base 12: mod_base = OTHER; note = cytidine
  modified_base 13: mod_base = OTHER; note = guanosine
  modified_base 14: mod_base = OTHER; note = thymidine
  modified_base 15: mod_base = cm
  modified_base 16: mod_base = OTHER; note = adenosine
  modified_base 17: mod_base = OTHER; note = adenosine
  modified_base 18: mod_base = OTHER; note = guanosine
  modified_base 19: mod_base = OTHER; note = guanosine
  modified_base 20: mod_base = OTHER; note = 2'-O-methylthymidine
  modified_base 21: mod_base = OTHER; note = 2'-O-methylthymidine
  source 1..21: mol_type = other DNA
attagctgtatcgtcaaggtt

SEQ ID NO: 1834 - DNA, 21 bp, synthetic construct
  modified_base 1: mod_base = OTHER; note = adenosine
  modified_base 2: mod_base = OTHER; note = adenosine
  modified_base 3: mod_base = OTHER; note = thymidine
  modified_base 4: mod_base = OTHER; note = guanosine
  modified_base 5: mod_base = OTHER; note = adenosine
  modified_base 6: mod_base = OTHER; note = thymidine
  modified_base 7: mod_base = OTHER; note = thymidine
  modified_base 8: mod_base = OTHER; note = cytidine
  modified_base 9: mod_base = OTHER; note = thymidine
  modified_base 10: mod_base = OTHER; note = guanosine
  modified_base 11: mod_base = OTHER; note = adenosine
  modified_base 12: mod_base = OTHER; note = adenosine
  modified_base 13: mod_base = OTHER; note = thymidine
  modified_base 14: mod_base = OTHER; note = 2'-O-methylthymidine
  modified_base 15: mod_base = OTHER; note = adenosine
  modified_base 16: mod_base = OTHER; note = guanosine
  modified_base 17: mod_base = OTHER; note = cytidine
  modified_base 18: mod_base = OTHER; note = thymidine
  modified_base 19: mod_base = OTHER; note = guanosine
  modified_base 20: mod_base = OTHER; note = 2'-O-methylthymidine
  modified_base 21: mod_base = OTHER; note = 2'-O-methylthymidine
  source 1..21: mol_type = other DNA
aatgattctgaattagctgtt

SEQ ID NO: 1835 - DNA, 21 bp, synthetic construct
  modified_base 1: mod_base = OTHER; note = 2'-O-methylthymidine
  modified_base 2: mod_base = OTHER; note = adenosine
  modified_base 3: mod_base = OTHER; note = thymidine
  modified_base 4: mod_base = OTHER; note = thymidine
  modified_base 5: mod_base = OTHER; note = guanosine
  modified_base 6: mod_base = OTHER; note = thymidine
  modified_base 7: mod_base = OTHER; note = thymidine
  modified_base 8: mod_base = OTHER; note = guanosine
  modified_base 9: mod_base = OTHER; note = guanosine
  modified_base 10: mod_base = OTHER; note = adenosine
  modified_base 11: mod_base = OTHER; note = thymidine
  modified_base 12: mod_base = cm
  modified_base 13: mod_base = OTHER; note = adenosine
  modified_base 14: mod_base = OTHER; note = 2'-O-methylthymidine
  modified_base 15: mod_base = OTHER; note = adenosine
  modified_base 16: mod_base = OTHER; note = thymidine
  modified_base 17: mod_base = OTHER; note = thymidine
  modified_base 18: mod_base = OTHER; note = cytidine
  modified_base 19: mod_base = OTHER; note = guanosine
  modified_base 20: mod_base = OTHER; note = 2'-O-methylthymidine
  modified_base 21: mod_base = OTHER; note = 2'-O-methylthymidine
  source 1..21: mol_type = other DNA
tattgttggatcatattcgtt

SEQ ID NO: 1836 - DNA, 21 bp, synthetic construct
  modified_base 1: mod_base = OTHER; note = thymidine
  modified_base 2: mod_base = cm
  modified_base 3: mod_base = OTHER; note = adenosine
  modified_base 4: mod_base = OTHER; note = adenosine
  modified_base 5: mod_base = OTHER; note = thymidine
  modified_base 6: mod_base = OTHER; note = 2'-O-methylthymidine
  modified_base 7: mod_base = OTHER; note = adenosine
  modified_base 8: mod_base = OTHER; note = cytidine
  modified_base 9: mod_base = OTHER; note = 2'-O-methylthymidine
  modified_base 10: mod_base = OTHER; note = adenosine
  modified_base 11: mod_base = OTHER; note = cytidine
  modified_base 12: mod_base = OTHER; note = thymidine
  modified_base 13: mod_base = OTHER; note = thymidine
  modified_base 14: mod_base = OTHER; note = guanosine
  modified_base 15: mod_base = OTHER; note = cytidine
  modified_base 16: mod_base = OTHER; note = thymidine
  modified_base 17: mod_base = OTHER; note = thymidine
  modified_base 18: mod_base = OTHER; note = cytidine
  modified_base 19: mod_base = OTHER; note = cytidine
  modified_base 20: mod_base = OTHER; note = 2'-O-methyluridine
  modified_base 21: mod_base = OTHER; note = 2'-O-methyluridine
  source 1..21: mol_type = other DNA
tcaattactacttgcttcctt

SEQ ID NO: 1837 - DNA, 21 bp, synthetic construct
  modified_base 1: mod_base = OTHER; note = adenosine
  modified_base 2: mod_base = OTHER; note = thymidine
  modified_base 3: mod_base = cm
  modified_base 4: mod_base = OTHER; note = adenosine
  modified_base 5: mod_base = OTHER; note = adenosine
  modified_base 6: mod_base = OTHER; note = thymidine
  modified_base 7: mod_base = OTHER; note = 2'-O-methylthymidine
  modified_base 8: mod_base = OTHER; note = adenosine
  modified_base 9: mod_base = OTHER; note = cytidine
  modified_base 10: mod_base = OTHER; note = 2'-O-methylthymidine
  modified_base 11: mod_base = OTHER; note = adenosine
  modified_base 12: mod_base = OTHER; note = cytidine
  modified_base 13: mod_base = OTHER; note = thymidine
  modified_base 14: mod_base = OTHER; note = thymidine
  modified_base 15: mod_base = OTHER; note = guanosine
  modified_base 16: mod_base = OTHER; note = cytidine
  modified_base 17: mod_base = OTHER; note = thymidine
  modified_base 18: mod_base = OTHER; note = thymidine
  modified_base 19: mod_base = OTHER; note = cytidine
  modified_base 20: mod_base = OTHER; note = 2'-O-methyluridine
  modified_base 21: mod_base = OTHER; note = 2'-O-methyluridine
  source 1..21: mol_type = other DNA
atcaattactacttgcttctt

SEQ ID NO: 1838 - DNA, 21 bp, synthetic construct
  modified_base 1: mod_base = OTHER; note = thymidine
  modified_base 2: mod_base = OTHER; note = thymidine
  modified_base 3: mod_base = OTHER; note = cytidine
  modified_base 4: mod_base = OTHER; note = thymidine
  modified_base 5: mod_base = OTHER; note = cytidine
  modified_base 6: mod_base = cm
  modified_base 7: mod_base = OTHER; note = adenosine
  modified_base 8: mod_base = OTHER; note = thymidine
  modified_base 9: mod_base = cm
  modified_base 10: mod_base = OTHER; note = adenosine
  modified_base 11: mod_base = OTHER; note = adenosine
  modified_base 12: mod_base = OTHER; note = thymidine
  modified_base 13: mod_base = OTHER; note = 2'-O-methylthymidine
  modified_base 14: mod_base = OTHER; note = adenosine
  modified_base 15: mod_base = OTHER; note = cytidine
  modified_base 16: mod_base = OTHER; note = 2'-O-methylthymidine
  modified_base 17: mod_base = OTHER; note = adenosine
  modified_base 18: mod_base = OTHER; note = cytidine
  modified_base 19: mod_base = OTHER; note = thymidine
  modified_base 20: mod_base = OTHER; note = 2'-O-methylthymidine
  modified_base 21: mod_base = OTHER; note = 2'-O-methylthymidine
  source 1..21: mol_type = other DNA
ttctccatcaattactacttt

SEQ ID NO: 1839 - DNA, 21 bp, synthetic construct
  modified_base 1: mod_base = OTHER; note = guanosine
  modified_base 2: mod_base = OTHER; note = thymidine
  modified_base 3: mod_base = OTHER; note = thymidine
  modified_base 4: mod_base = OTHER; note = thymidine
  modified_base 5: mod_base = OTHER; note = cytidine
  modified_base 6: mod_base = OTHER; note = thymidine
  modified_base 7: mod_base = OTHER; note = cytidine
  modified_base 8: mod_base = cm
  modified_base 9: mod_base = OTHER; note = adenosine
  modified_base 10: mod_base = OTHER; note = thymidine
  modified_base 11: mod_base = cm
  modified_base 12: mod_base = OTHER; note = adenosine
  modified_base 13: mod_base = OTHER; note = adenosine
  modified_base 14: mod_base = OTHER; note = thymidine
  modified_base 15: mod_base = OTHER; note = 2'-O-methylthymidine
  modified_base 16: mod_base = OTHER; note = adenosine
  modified_base 17: mod_base = OTHER; note = cytidine
  modified_base 18: mod_base = OTHER; note = 2'-O-methylthymidine
  modified_base 19: mod_base = OTHER; note = adenosine
  modified_base 20: mod_base = OTHER; note = 2'-O-methylthymidine
  modified_base 21: mod_base = OTHER; note = 2'-O-methylthymidine
  source 1..21: mol_type = other DNA
gtttctccatcaattactatt

SEQ ID NO: 1840 - DNA, 21 bp, synthetic construct
  modified_base 1: mod_base = OTHER; note = thymidine
  modified_base 2: mod_base = OTHER; note = cytidine
  modified_base 3: mod_base = OTHER; note = guanosine
  modified_base 4: mod_base = OTHER; note = adenosine
  modified_base 5: mod_base = OTHER; note = guanosine
  modified_base 6: mod_base = OTHER; note = adenosine
  modified_base 7: mod_base = OTHER; note = adenosine
  modified_base 8: mod_base = OTHER; note = 2'-O-methylthymidine
  modified_base 9: mod_base = OTHER; note = adenosine
  modified_base 10: mod_base = OTHER; note = thymidine
  modified_base 11: mod_base = OTHER; note = cytidine
  modified_base 12: mod_base = cm
  modified_base 13: mod_base = OTHER; note = adenosine
  modified_base 14: mod_base = OTHER; note = adenosine
  modified_base 15: mod_base = OTHER; note = guanosine
  modified_base 16: mod_base = OTHER; note = adenosine
  modified_base 17: mod_base = OTHER; note = guanosine
  modified_base 18: mod_base = OTHER; note = adenosine
  modified_base 19: mod_base = OTHER; note = cytidine
  modified_base 20: mod_base = OTHER; note = 2'-O-methylthymidine
  modified_base 21: mod_base = OTHER; note = 2'-O-methylthymidine
  source 1..21: mol_type = other DNA
tcgagaatatccaagagactt

SEQ ID NO: 1841 - DNA, 21 bp, synthetic construct
  modified_base 1: mod_base = OTHER; note = adenosine
  modified_base 2: mod_base = OTHER; note = adenosine
  modified_base 3: mod_base = OTHER; note = adenosine
  modified_base 4: mod_base = OTHER; note = 2'-O-methylthymidine
  modified_base 5: mod_base = OTHER; note = adenosine
  modified_base 6: mod_base = cm
  modified_base 7: mod_base = OTHER; note = adenosine
  modified_base 8: mod_base = cm
  modified_base 9: mod_base = OTHER; note = adenosine
  modified_base 10: mod_base = OTHER; note = adenosine
  modified_base 11: mod_base = OTHER; note = adenosine
  modified_base 12: mod_base = OTHER; note = guanosine
  modified_base 13: mod_base = OTHER; note = adenosine
  modified_base 14: mod_base = OTHER; note = adenosine
  modified_base 15: mod_base = OTHER; note = adenosine
  modified_base 16: mod_base = OTHER; note = guanosine
  modified_base 17: mod_base = OTHER; note = cytidine
  modified_base 18: mod_base = OTHER; note = cytidine
  modified_base 19: mod_base = OTHER; note = cytidine
  modified_base 20: mod_base = OTHER; note = 2'-O-methylthymidine
  modified_base 21: mod_base = OTHER; note = 2'-O-methylthymidine
  source 1..21: mol_type = other DNA
aaatacacaaagaaagccctt

SEQ ID NO: 1842 - DNA, 21 bp, synthetic construct
  modified_base 1: mod_base = OTHER; note = thymidine
  modified_base 2: mod_base = OTHER; note = 2'-O-methylthymidine
  modified_base 3: mod_base = OTHER; note = adenosine
  modified_base 4: mod_base = OTHER; note = thymidine
  modified_base 5: mod_base = OTHER; note = thymidine
  modified_base 6: mod_base = OTHER; note = 2'-O-methylthymidine
  modified_base 7: mod_base = OTHER; note = adenosine
  modified_base 8: mod_base = OTHER; note = thymidine
  modified_base 9: mod_base = OTHER; note = guanosine
  modified_base 10: mod_base = OTHER; note = guanosine
  modified_base 11: mod_base = cm
  modified_base 12: mod_base = OTHER; note = adenosine
  modified_base 13: mod_base = OTHER; note = adenosine
  modified_base 14: mod_base = OTHER; note = adenosine
  modified_base 15: mod_base = OTHER; note = 2'-O-methylthymidine
  modified_base 16: mod_base = OTHER; note = adenosine
  modified_base 17: mod_base = cm
  modified_base 18: mod_base = OTHER; note = adenosine
  modified_base 19: mod_base = OTHER; note = cytidine
  modified_base 20: mod_base = OTHER; note = 2'-O-methylthymidine
  modified_base 21: mod_base = OTHER; note = 2'-O-methylthymidine
  source 1..21: mol_type = other DNA
ttatttatggcaaatacactt

SEQ ID NO: 1843 - DNA, 21 bp, synthetic construct
  modified_base 1: mod_base = OTHER; note = guanosine
  modified_base 2: mod_base = OTHER; note = adenosine
  modified_base 3: mod_base = OTHER; note = thymidine
  modified_base 4: mod_base = OTHER; note = thymidine
  modified_base 5: mod_base = OTHER; note = 2'-O-methylthymidine
  modified_base 6: mod_base = OTHER; note = adenosine
  modified_base 7: mod_base = OTHER; note = guanosine
  modified_base 8: mod_base = OTHER; note = 2'-O-methylthymidine
  modified_base 9: mod_base = OTHER; note = adenosine
  modified_base 10: mod_base = OTHER; note = thymidine
  modified_base 11: mod_base = OTHER; note = 2'-O-methylthymidine
  modified_base 12: mod_base = OTHER; note = adenosine
  modified_base 13: mod_base = OTHER; note = thymidine
  modified_base 14: mod_base = OTHER; note = thymidine
  modified_base 15: mod_base = OTHER; note = 2'-O-methylthymidine
  modified_base 16: mod_base = OTHER; note = adenosine
  modified_base 17: mod_base = OTHER; note = thymidine
  modified_base 18: mod_base = OTHER; note = guanosine
  modified_base 19: mod_base = OTHER; note = guanosine
  modified_base 20: mod_base = OTHER; note = 2'-O-methylthymidine
  modified_base 21: mod_base = OTHER; note = 2'-O-methylthymidine
  source 1..21: mol_type = other DNA
gatttagtattatttatggtt

SEQ ID NO: 1844 - DNA, 21 bp, synthetic construct
  modified_base 1: mod_base = OTHER; note = adenosine
  modified_base 2: mod_base = OTHER; note = thymidine
  modified_base 3: mod_base = OTHER; note = cytidine
  modified_base 4: mod_base = OTHER; note = thymidine
  modified_base 5: mod_base = OTHER; note = thymidine
  modified_base 6: mod_base = cm
  modified_base 7: mod_base = OTHER; note = adenosine
  modified_base 8: mod_base = OTHER; note = adenosine
  modified_base 9: mod_base = OTHER; note = adenosine
  modified_base 10: mod_base = OTHER; note = thymidine
  modified_base 11: mod_base = OTHER; note = guanosine
  modified_base 12: mod_base = OTHER; note = adenosine
  modified_base 13: mod_base = OTHER; note = thymidine
  modified_base 14: mod_base = OTHER; note = thymidine
  modified_base 15: mod_base = OTHER; note = 2'-O-methylthymidine
  modified_base 16: mod_base = OTHER; note = adenosine
  modified_base 17: mod_base = OTHER; note = guanosine
  modified_base 18: mod_base = OTHER; note = 2'-O-methylthymidine
  modified_base 19: mod_base = OTHER; note = adenosine
  modified_base 20: mod_base = OTHER; note = 2'-O-methylthymidine
  modified_base 21: mod_base = OTHER; note = 2'-O-methylthymidine
  source 1..21: mol_type = other DNA
atcttcaaatgatttagtatt

SEQ ID NO: 1845 - DNA, 21 bp, synthetic construct
  modified_base 1: mod_base = OTHER; note = adenosine
  modified_base 2: mod_base = OTHER; note = 2'-O-methylthymidine
  modified_base 3: mod_base = OTHER; note = adenosine
  modified_base 4: mod_base = OTHER; note = thymidine
  modified_base 5: mod_base = OTHER; note = cytidine
  modified_base 6: mod_base = OTHER; note = thymidine
  modified_base 7: mod_base = OTHER; note = thymidine
  modified_base 8: mod_base = cm
  modified_base 9: mod_base = OTHER; note = adenosine
  modified_base 10: mod_base = OTHER; note = adenosine
  modified_base 11: mod_base = OTHER; note = adenosine
  modified_base 12: mod_base = OTHER; note = thymidine
  modified_base 13: mod_base = OTHER; note = guanosine
  modified_base 14: mod_base = OTHER; note = adenosine
  modified_base 15: mod_base = OTHER; note = thymidine
  modified_base 16: mod_base = OTHER; note = thymidine
  modified_base 17: mod_base = OTHER; note = 2'-O-methylthymidine
  modified_base 18: mod_base = OTHER; note = adenosine
  modified_base 19: mod_base = OTHER; note = guanosine
  modified_base 20: mod_base = OTHER; note = 2'-O-methyluridine
  modified_base 21: mod_base = OTHER; note = 2'-O-methyluridine
  source 1..21: mol_type = other DNA
atatcttcaaatgatttagtt

SEQ ID NO: 1846 - DNA, 21 bp, synthetic construct
  modified_base 1: mod_base = OTHER; note = 2'-O-methylthymidine
  modified_base 2: mod_base = OTHER; note = adenosine
  modified_base 3: mod_base = OTHER; note = 2'-O-methylthymidine
  modified_base 4: mod_base = OTHER; note = adenosine
  modified_base 5: mod_base = OTHER; note = adenosine
  modified_base 6: mod_base = OTHER; note = thymidine
  modified_base 7: mod_base = OTHER; note = guanosine
  modified_base 8: mod_base = OTHER; note = guanosine
  modified_base 9: mod_base = OTHER; note = thymidine
  modified_base 10: mod_base = OTHER; note = guanosine
  modified_base 11: mod_base = OTHER; note = adenosine
  modified_base 12: mod_base = OTHER; note = adenosine
  modified_base 13: mod_base = OTHER; note = 2'-O-methylthymidine
  modified_base 14: mod_base = OTHER; note = adenosine
  modified_base 15: mod_base = OTHER; note = thymidine
  modified_base 16: mod_base = OTHER; note = cytidine
  modified_base 17: mod_base = OTHER; note = thymidine
  modified_base 18: mod_base = OTHER; note = thymidine
  modified_base 19: mod_base = OTHER; note = cytidine
  modified_base 20: mod_base = OTHER; note = 2'-O-methylthymidine
  modified_base 21: mod_base = OTHER; note = 2'-O-methylthymidine
  source 1..21: mol_type = other DNA
tataatggtgaatatcttctt

SEQ ID NO: 1847 - DNA, 21 bp, synthetic construct
  modified_base 1: mod_base = OTHER; note = thymidine
  modified_base 2: mod_base = OTHER; note = cytidine
  modified_base 3: mod_base = OTHER; note = 2'-O-methylthymidine
  modified_base 4: mod_base = OTHER; note = adenosine
  modified_base 5: mod_base = OTHER; note = 2'-O-methylthymidine
  modified_base 6: mod_base = OTHER; note = adenosine
  modified_base 7: mod_base = OTHER; note = adenosine
  modified_base 8: mod_base = OTHER; note = thymidine
  modified_base 9: mod_base = OTHER; note = guanosine
  modified_base 10: mod_base = OTHER; note = guanosine
  modified_base 11: mod_base = OTHER; note = thymidine
  modified_base 12: mod_base = OTHER; note = guanosine
  modified_base 13: mod_base = OTHER; note = adenosine
  modified_base 14: mod_base = OTHER; note = adenosine
  modified_base 15: mod_base = OTHER; note = 2'-O-methylthymidine
  modified_base 16: mod_base = OTHER; note = adenosine
  modified_base 17: mod_base = OTHER; note = thymidine
  modified_base 18: mod_base = OTHER; note = cytidine
  modified_base 19: mod_base = OTHER; note = thymidine
  modified_base 20: mod_base = OTHER; note = 2'-O-methylthymidine
  modified_base 21: mod_base = OTHER; note = 2'-O-methylthymidine
  source 1..21: mol_type = other DNA
tctataatggtgaatatcttt

SEQ ID NO: 1848 - DNA, 21 bp, synthetic construct
  modified_base 1: mod_base = OTHER; note = thymidine
  modified_base 2: mod_base = OTHER; note = cytidine
  modified_base 3: mod_base = OTHER; note = thymidine
  modified_base 4: mod_base = OTHER; note = cytidine
  modified_base 5: mod_base = OTHER; note = 2'-O-methylthymidine
  modified_base 6: mod_base = OTHER; note = adenosine
  modified_base 7: mod_base = OTHER; note = 2'-O-methylthymidine
  modified_base 8: mod_base = OTHER; note = adenosine
  modified_base 9: mod_base = OTHER; note = adenosine
  modified_base 10: mod_base = OTHER; note = thymidine
  modified_base 11: mod_base = OTHER; note = guanosine
  modified_base 12: mod_base = OTHER; note = guanosine
  modified_base 13: mod_base = OTHER; note = thymidine
  modified_base 14: mod_base = OTHER; note = guanosine
  modified_base 15: mod_base = OTHER; note = adenosine
  modified_base 16: mod_base = OTHER; note = adenosine
  modified_base 17: mod_base = OTHER; note = 2'-O-methylthymidine
  modified_base 18: mod_base = OTHER; note = adenosine
  modified_base 19: mod_base = OTHER; note = thymidine
  modified_base 20: mod_base = OTHER; note = 2'-O-methylthymidine
  modified_base 21: mod_base = OTHER; note = 2'-O-methylthymidine
  source 1..21: mol_type = other DNA
tctctataatggtgaatattt

SEQ ID NO: 1849 - DNA, 21 bp, synthetic construct
  modified_base 1: mod_base = OTHER; note = thymidine
  modified_base 2: mod_base = OTHER; note = thymidine
  modified_base 3: mod_base = OTHER; note = cytidine
  modified_base 4: mod_base = OTHER; note = thymidine
  modified_base 5: mod_base = OTHER; note = cytidine
  modified_base 6: mod_base = OTHER; note = 2'-O-methylthymidine
  modified_base 7: mod_base = OTHER; note = adenosine
  modified_base 8: mod_base = OTHER; note = 2'-O-methylthymidine
  modified_base 9: mod_base = OTHER; note = adenosine
  modified_base 10: mod_base = OTHER; note = adenosine
  modified_base 11: mod_base = OTHER; note = thymidine
  modified_base 12: mod_base = OTHER; note = guanosine
  modified_base 13: mod_base = OTHER; note = guanosine
  modified_base 14: mod_base = OTHER; note = thymidine
  modified_base 15: mod_base = OTHER; note = guanosine
  modified_base 16: mod_base = OTHER; note = adenosine
  modified_base 17: mod_base = OTHER; note = adenosine
  modified_base 18: mod_base = OTHER; note = 2'-O-methylthymidine
  modified_base 19: mod_base = OTHER; note = adenosine
  modified_base 20: mod_base = OTHER; note = 2'-O-methylthymidine
  modified_base 21: mod_base = OTHER; note = 2'-O-methylthymidine
  source 1..21: mol_type = other DNA
ttctctataatggtgaatatt

SEQ ID NO: 1850 - DNA, 21 bp, synthetic construct
  modified_base 1: mod_base = OTHER; note = 2'-O-methylthymidine
  modified_base 2: mod_base = OTHER; note = adenosine
  modified_base 3: mod_base = OTHER; note = adenosine
  modified_base 4: mod_base = OTHER; note = thymidine
  modified_base 5: mod_base = OTHER; note = thymidine
  modified_base 6: mod_base = OTHER; note = thymidine
  modified_base 7: mod_base = OTHER; note = guanosine
  modified_base 8: mod_base = OTHER; note = thymidine
  modified_base 9: mod_base = OTHER; note = thymidine
  modified_base 10: mod_base = OTHER; note = cytidine
  modified_base 11: mod_base = OTHER; note = thymidine
  modified_base 12: mod_base = OTHER; note = cytidine
  modified_base 13: mod_base = OTHER; note = 2'-O-methylthymidine
  modified_base 14: mod_base = OTHER; note = adenosine
  modified_base 15: mod_base = OTHER; note = 2'-O-methylthymidine
  modified_base 16: mod_base = OTHER; note = adenosine
  modified_base 17: mod_base = OTHER; note = adenosine
  modified_base 18: mod_base = OTHER; note = thymidine
  modified_base 19: mod_base = OTHER; note = guanosine
  modified_base 20: mod_base = OTHER; note = 2'-O-methylthymidine
  modified_base 21: mod_base = OTHER; note = 2'-O-methylthymidine
  source 1..21: mol_type = other DNA
taatttgttctctataatgtt

SEQ ID NO: 1851 - DNA, 21 bp, synthetic construct
  modified_base 1: mod_base = OTHER; note = thymidine
  modified_base 2: mod_base = OTHER; note = thymidine
  modified_base 3: mod_base = OTHER; note = 2'-O-methylthymidine
  modified_base 4: mod_base = OTHER; note = adenosine
  modified_base 5: mod_base = OTHER; note = adenosine
  modified_base 6: mod_base = OTHER; note = thymidine
  modified_base 7: mod_base = OTHER; note = thymidine
  modified_base 8: mod_base = OTHER; note = thymidine
  modified_base 9: mod_base = OTHER; note = guanosine
  modified_base 10: mod_base = OTHER; note = thymidine
  modified_base 11: mod_base = OTHER; note = thymidine
  modified_base 12: mod_base = OTHER; note = cytidine
  modified_base 13: mod_base = OTHER; note = thymidine
  modified_base 14: mod_base = OTHER; note = cytidine
  modified_base 15: mod_base = OTHER; note = 2'-O-methylthymidine
  modified_base 16: mod_base = OTHER; note = adenosine
  modified_base 17: mod_base = OTHER; note = 2'-O-methylthymidine
  modified_base 18: mod_base = OTHER; note = adenosine
  modified_base 19: mod_base = OTHER; note = adenosine
  modified_base 20: mod_base = OTHER; note = 2'-O-methylthymidine
  modified_base 21: mod_base = OTHER; note = 2'-O-methylthymidine
  source 1..21: mol_type = other DNA
tttaatttgttctctataatt

SEQ ID NO: 1852 - DNA, 21 bp, synthetic construct
  modified_base 1: mod_base = OTHER; note = thymidine
  modified_base 2: mod_base = OTHER; note = cytidine
  modified_base 3: mod_base = OTHER; note = thymidine
  modified_base 4: mod_base = OTHER; note = thymidine
  modified_base 5: mod_base = cm
  modified_base 6: mod_base = OTHER; note = adenosine
  modified_base 7: mod_base = OTHER; note = guanosine
  modified_base 8: mod_base = OTHER; note = adenosine
  modified_base 9: mod_base = OTHER; note = guanosine
  modified_base 10: mod_base = OTHER; note = thymidine
  modified_base 11: mod_base = OTHER; note = cytidine
  modified_base 12: mod_base = OTHER; note = cytidine
  modified_base 13: mod_base = OTHER; note = thymidine
  modified_base 14: mod_base = OTHER; note = 2'-O-methylthymidine
  modified_base 15: mod_base = OTHER; note = adenosine
  modified_base 16: mod_base = OTHER; note = adenosine
  modified_base 17: mod_base = OTHER; note = cytidine
  modified_base 18: mod_base = OTHER; note = thymidine
  modified_base 19: mod_base = OTHER; note = cytidine
  modified_base 20: mod_base = OTHER; note = 2'-O-methylthymidine
  modified_base 21: mod_base = OTHER; note = 2'-O-methylthymidine
  source 1..21: mol_type = other DNA
tcttcagagtccttaactctt

SEQ ID NO: 1853 - DNA, 21 bp, synthetic construct
  modified_base 1: mod_base = OTHER; note = thymidine
  modified_base 2: mod_base = OTHER; note = thymidine
  modified_base 3: mod_base = OTHER; note = thymidine
  modified_base 4: mod_base = OTHER; note = cytidine
  modified_base 5: mod_base = OTHER; note = cytidine
  modified_base 6: mod_base = OTHER; note = 2'-O-methylthymidine
  modified_base 7: mod_base = OTHER; note = adenosine
  modified_base 8: mod_base = OTHER; note = cytidine
  modified_base 9: mod_base = OTHER; note = 2'-O-methylthymidine
  modified_base 10: mod_base = OTHER; note = adenosine
  modified_base 11: mod_base = OTHER; note = guanosine
  modified_base 12: mod_base = OTHER; note = guanosine
  modified_base 13: mod_base = OTHER; note = adenosine
  modified_base 14: mod_base = OTHER; note = cytidine
  modified_base 15: mod_base = cm
  modified_base 16: mod_base = OTHER; note = adenosine
  modified_base 17: mod_base = OTHER; note = 2'-O-methylthymidine
  modified_base 18: mod_base = OTHER; note = adenosine
  modified_base 19: mod_base = OTHER; note = guanosine
  modified_base 20: mod_base = OTHER; note = 2'-O-methyluridine
  modified_base 21: mod_base = OTHER; note = 2'-O-methyluridine
  source 1..21: mol_type = other DNA
tttcctactaggaccatagtt

SEQ ID NO: 1854 - DNA, 21 bp, synthetic construct
  modified_base 1: mod_base = OTHER; note = thymidine
  modified_base 2: mod_base = OTHER; note = 2'-O-methylthymidine
  modified_base 3: mod_base = OTHER; note = adenosine
  modified_base 4: mod_base = OTHER; note = thymidine
  modified_base 5: mod_base = OTHER; note = thymidine
  modified_base 6: mod_base = OTHER; note = thymidine
  modified_base 7: mod_base = OTHER; note = cytidine
  modified_base 8: mod_base = OTHER; note = cytidine
  modified_base 9: mod_base = OTHER; note = 2'-O-methylthymidine
  modified_base 10: mod_base = OTHER; note = adenosine
  modified_base 11: mod_base = OTHER; note = cytidine
  modified_base 12: mod_base = OTHER; note = 2'-O-methylthymidine
  modified_base 13: mod_base = OTHER; note = adenosine
  modified_base 14: mod_base = OTHER; note = guanosine
  modified_base 15: mod_base = OTHER; note = guanosine
  modified_base 16: mod_base = OTHER; note = adenosine
  modified_base 17: mod_base = OTHER; note = cytidine
  modified_base 18: mod_base = cm
  modified_base 19: mod_base = OTHER; note = adenosine
  modified_base 20: mod_base = OTHER; note = 2'-O-methyluridine
  modified_base 21: mod_base = OTHER; note = 2'-O-methyluridine
  source 1..21: mol_type = other DNA
ttatttcctactaggaccatt

SEQ ID NO: 1855 - DNA, 21 bp, synthetic construct
  modified_base 1: mod_base = OTHER; note = thymidine
  modified_base 2: mod_base = OTHER; note = thymidine
  modified_base 3: mod_base = OTHER; note = 2'-O-methylthymidine
  modified_base 4: mod_base = OTHER; note = adenosine
  modified_base 5: mod_base = OTHER; note = thymidine
  modified_base 6: mod_base = OTHER; note = thymidine
  modified_base 7: mod_base = OTHER; note = thymidine
  modified_base 8: mod_base = OTHER; note = cytidine
  modified_base 9: mod_base = OTHER; note = cytidine
  modified_base 10: mod_base = OTHER; note = 2'-O-methylthymidine
  modified_base 11: mod_base = OTHER; note = adenosine
  modified_base 12: mod_base = OTHER; note = cytidine
  modified_base 13: mod_base = OTHER; note = 2'-O-methylthymidine
  modified_base 14: mod_base = OTHER; note = adenosine
  modified_base 15: mod_base = OTHER; note = guanosine
  modified_base 16: mod_base = OTHER; note = guanosine
  modified_base 17: mod_base = OTHER; note = adenosine
  modified_base 18: mod_base = OTHER; note = cytidine
  modified_base 19: mod_base = OTHER; note = cytidine
  modified_base 20: mod_base = OTHER; note = 2'-O-methylthymidine
  modified_base 21: mod_base = OTHER; note = 2'-O-methylthymidine
  source 1..21: mol_type = other DNA
tttatttcctactaggacctt

SEQ ID NO: 1856 - DNA, 21 bp, synthetic construct
  modified_base 1: mod_base = OTHER; note = adenosine
  modified_base 2: mod_base = OTHER; note = adenosine
  modified_base 3: mod_base = OTHER; note = thymidine
  modified_base 4: mod_base = cm
  modified_base 5: mod_base = OTHER; note = adenosine
  modified_base 6: mod_base = cm
  modified_base 7: mod_base = OTHER; note = adenosine
  modified_base 8: mod_base = OTHER; note = thymidine
  modified_base 9: mod_base = OTHER; note = thymidine
  modified_base 10: mod_base = OTHER; note = 2'-O-methylthymidine
  modified_base 11: mod_base = OTHER; note = adenosine
  modified_base 12: mod_base = OTHER; note = thymidine
  modified_base 13: mod_base = OTHER; note = thymidine
  modified_base 14: mod_base = OTHER; note = thymidine
  modified_base 15: mod_base = OTHER; note = cytidine
  modified_base 16: mod_base = OTHER; note = cytidine
  modified_base 17: mod_base = OTHER; note = 2'-O-methylthymidine
  modified_base 18: mod_base = OTHER; note = adenosine
  modified_base 19: mod_base = OTHER; note = cytidine
  modified_base 20: mod_base = OTHER; note = 2'-O-methylthymidine
  modified_base 21: mod_base = OTHER; note = 2'-O-methylthymidine
  source 1..21: mol_type = other DNA
aatcacatttatttcctactt

SEQ ID NO: 1857 - DNA, 21 bp, synthetic construct
  modified_base 1: mod_base = OTHER; note = thymidine
  modified_base 2: mod_base = OTHER; note = cytidine
  modified_base 3: mod_base = OTHER; note = 2'-O-methylthymidine
  modified_base 4: mod_base = OTHER; note = adenosine
  modified_base 5: mod_base = OTHER; note = guanosine
  modified_base 6: mod_base = OTHER; note = adenosine
  modified_base 7: mod_base = OTHER; note = adenosine
  modified_base 8: mod_base = OTHER; note = guanosine
  modified_base 9: mod_base = OTHER; note = guanosine
  modified_base 10: mod_base = cm
  modified_base 11: mod_base = OTHER; note = adenosine
  modified_base 12: mod_base = OTHER; note = adenosine
  modified_base 13: mod_base = OTHER; note = adenosine
  modified_base 14: mod_base = OTHER; note = thymidine
  modified_base 15: mod_base = cm
  modified_base 16: mod_base = OTHER; note = adenosine
  modified_base 17: mod_base = cm
  modified_base 18: mod_base = OTHER; note = adenosine
  modified_base 19: mod_base = OTHER; note = thymidine
  modified_base 20: mod_base = OTHER; note = 2'-O-methylthymidine
  modified_base 21: mod_base = OTHER; note = 2'-O-methylthymidine
  source 1..21: mol_type = other DNA
tctagaaggcaaatcacattt

SEQ ID NO: 1858 - DNA, 21 bp, synthetic construct
  modified_base 1: mod_base = OTHER; note = thymidine
  modified_base 2: mod_base = OTHER; note = guanosine
  modified_base 3: mod_base = OTHER; note = thymidine
  modified_base 4: mod_base = OTHER; note = cytidine
  modified_base 5: mod_base = OTHER; note = 2'-O-methylthymidine
  modified_base 6: mod_base = OTHER; note = adenosine
  modified_base 7: mod_base = OTHER; note = cytidine
  modified_base 8: mod_base = OTHER; note = thymidine
  modified_base 9: mod_base = OTHER; note = guanosine
  modified_base 10: mod_base = OTHER; note = thymidine
  modified_base 11: mod_base = OTHER; note = thymidine
  modified_base 12: mod_base = OTHER; note = cytidine
  modified_base 13: mod_base = OTHER; note = 2'-O-methylthymidine
  modified_base 14: mod_base = OTHER; note = adenosine
  modified_base 15: mod_base = OTHER; note = guanosine
  modified_base 16: mod_base = OTHER; note = adenosine
  modified_base 17: mod_base = OTHER; note = adenosine
  modified_base 18: mod_base = OTHER; note = guanosine
  modified_base 19: mod_base = OTHER; note = guanosine
  modified_base 20: mod_base = OTHER; note = 2'-O-methylthymidine
  modified_base 21: mod_base = OTHER; note = 2'-O-methylthymidine
  source 1..21: mol_type = other DNA
tgtctactgttctagaaggtt

SEQ ID NO: 1859 - DNA, 21 bp, synthetic construct
  modified_base 1: mod_base = OTHER; note = cytidine
  modified_base 2: mod_base = OTHER; note = thymidine
  modified_base 3: mod_base = OTHER; note = thymidine
  modified_base 4: mod_base = OTHER; note = guanosine
  modified_base 5: mod_base = OTHER; note = cytidine
  modified_base 6: mod_base = OTHER; note = 2'-O-methylthymidine
  modified_base 7: mod_base = OTHER; note = adenosine
  modified_base 8: mod_base = OTHER; note = adenosine
  modified_base 9: mod_base = OTHER; note = guanosine
  modified_base 10: mod_base = OTHER; note = thymidine
  modified_base 11: mod_base = OTHER; note = cytidine
  modified_base 12: mod_base = OTHER; note = cytidine
  modified_base 13: mod_base = OTHER; note = thymidine
  modified_base 14: mod_base = OTHER; note = guanosine
  modified_base 15: mod_base = OTHER; note = adenosine
  modified_base 16: mod_base = OTHER; note = guanosine
  modified_base 17: mod_base = OTHER; note = cytidine
  modified_base 18: mod_base = OTHER; note = cytidine
  modified_base 19: mod_base = OTHER; note = thymidine
  modified_base 20: mod_base = OTHER; note = 2'-O-methylthymidine
  modified_base 21: mod_base = OTHER; note = 2'-O-methylthymidine
  source 1..21: mol_type = other DNA
cttgctaagtcctgagccttt

SEQ ID NO: 1860 - DNA, 21 bp, synthetic construct
  modified_base 1: mod_base = OTHER; note = adenosine
  modified_base 2: mod_base = OTHER; note = 2'-O-methylthymidine
  modified_base 3: mod_base = OTHER; note = adenosine
  modified_base 4: mod_base = OTHER; note = adenosine
  modified_base 5: mod_base = OTHER; note = cytidine
  modified_base 6: mod_base = OTHER; note = thymidine
  modified_base 7: mod_base = OTHER; note = thymidine
  modified_base 8: mod_base = OTHER; note = cytidine
  modified_base 9: mod_base = OTHER; note = thymidine
  modified_base 10: mod_base = OTHER; note = thymidine
  modified_base 11: mod_base = OTHER; note = guanosine
  modified_base 12: mod_base = OTHER; note = cytidine
  modified_base 13: mod_base = OTHER; note = 2'-O-methylthymidine
  modified_base 14: mod_base = OTHER; note = adenosine
  modified_base 15: mod_base = OTHER; note = adenosine
  modified_base 16: mod_base = OTHER; note = guanosine
  modified_base 17: mod_base = OTHER; note = thymidine
  modified_base 18: mod_base = OTHER; note = cytidine
  modified_base 19: mod_base = OTHER; note = cytidine
  modified_base 20: mod_base = OTHER; note = 2'-O-methylthymidine
  modified_base 21: mod_base = OTHER; note = 2'-O-methylthymidine
  source 1..21: mol_type = other DNA
ataacttcttgctaagtcctt

SEQ ID NO: 1861 - DNA, 21 bp, synthetic construct
  modified_base 1: mod_base = OTHER; note = adenosine
  modified_base 2: mod_base = OTHER; note = adenosine
  modified_base 3: mod_base = OTHER; note = thymidine
  modified_base 4: mod_base = OTHER; note = thymidine
  modified_base 5: mod_base = OTHER; note = cytidine
  modified_base 6: mod_base = cm
  modified_base 7: mod_base = OTHER; note = adenosine
  modified_base 8: mod_base = OTHER; note = 2'-O-methylthymidine
  modified_base 9: mod_base = OTHER; note = adenosine
  modified_base 10: mod_base = OTHER; note = adenosine
  modified_base 11: mod_base = OTHER; note = cytidine
  modified_base 12: mod_base = OTHER; note = thymidine
  modified_base 13: mod_base = OTHER; note = thymidine
  modified_base 14: mod_base = OTHER; note = cytidine
  modified_base 15: mod_base = OTHER; note = thymidine
  modified_base 16: mod_base = OTHER; note = thymidine
  modified_base 17: mod_base = OTHER; note = guanosine
  modified_base 18: mod_base = OTHER; note = cytidine
  modified_base 19: mod_base = OTHER; note = thymidine
  modified_base 20: mod_base = OTHER; note = 2'-O-methylthymidine
  modified_base 21: mod_base = OTHER; note = 2'-O-methylthymidine
  source 1..21: mol_type = other DNA
aattccataacttcttgcttt

SEQ ID NO: 1862 - DNA, 21 bp, synthetic construct
  modified_base 1: mod_base = OTHER; note = adenosine
  modified_base 2: mod_base = OTHER; note = adenosine
  modified_base 3: mod_base = OTHER; note = 2'-O-methylthymidine
  modified_base 4: mod_base = OTHER; note = adenosine
  modified_base 5: mod_base = OTHER; note = adenosine
  modified_base 6: mod_base = OTHER; note = adenosine
  modified_base 7: mod_base = OTHER; note = adenosine
  modified_base 8: mod_base = OTHER; note = guanosine
  modified_base 9: mod_base = OTHER; note = guanosine
  modified_base 10: mod_base = OTHER; note = adenosine
  modified_base 11: mod_base = OTHER; note = adenosine
  modified_base 12: mod_base = OTHER; note = thymidine
  modified_base 13: mod_base = OTHER; note = thymidine
  modified_base 14: mod_base = OTHER; note = cytidine
  modified_base 15: mod_base = cm
  modified_base 16: mod_base = OTHER; note = adenosine
  modified_base 17: mod_base = OTHER; note = 2'-O-methylthymidine
  modified_base 18: mod_base = OTHER; note = adenosine
  modified_base 19: mod_base = OTHER; note = adenosine
  modified_base 20: mod_base = OTHER; note = 2'-O-methylthymidine
  modified_base 21: mod_base = OTHER; note = 2'-O-methylthymidine
  source 1..21: mol_type = other DNA
aataaaaggaattccataatt

SEQ ID NO: 1863 - DNA, 21 bp, synthetic construct
  modified_base 1: mod_base = OTHER; note = thymidine
  modified_base 2: mod_base = OTHER; note = thymidine
  modified_base 3: mod_base = OTHER; note = thymidine
  modified_base 4: mod_base = cm
  modified_base 5: mod_base = OTHER; note = adenosine
  modified_base 6: mod_base = OTHER; note = adenosine
  modified_base 7: mod_base = OTHER; note = 2'-O-methylthymidine
  modified_base 8: mod_base = OTHER; note = adenosine
  modified_base 9: mod_base = OTHER; note = adenosine
  modified_base 10: mod_base = OTHER; note = adenosine
  modified_base 11: mod_base = OTHER; note = adenosine
  modified_base 12: mod_base = OTHER; note = guanosine
  modified_base 13: mod_base = OTHER; note = guanosine
  modified_base 14: mod_base = OTHER; note = adenosine
  modified_base 15: mod_base = OTHER; note = adenosine
  modified_base 16: mod_base = OTHER; note = thymidine
  modified_base 17: mod_base = OTHER; note = thymidine
  modified_base 18: mod_base = OTHER; note = cytidine
  modified_base 19: mod_base = OTHER; note = cytidine
  modified_base 20: mod_base = OTHER; note = 2'-O-methylthymidine
  modified_base 21: mod_base = OTHER; note = 2'-O-methylthymidine
  source 1..21: mol_type = other DNA
tttcaataaaaggaattcctt

SEQ ID NO: 1864 - DNA, 21 bp, synthetic construct
  modified_base 1: mod_base = OTHER; note = cytidine
  modified_base 2: mod_base = OTHER; note = thymidine
  modified_base 3: mod_base = OTHER; note = guanosine
  modified_base 4: mod_base = OTHER; note = adenosine
  modified_base 5: mod_base = OTHER; note = thymidine
  modified_base 6: mod_base = OTHER; note = guanosine
  modified_base 7: mod_base = OTHER; note = thymidine
  modified_base 8: mod_base = OTHER; note = thymidine
  modified_base 9: mod_base = OTHER; note = thymidine
  modified_base 10: mod_base = cm
  modified_base 11: mod_base = OTHER; note = adenosine
  modified_base 12: mod_base = OTHER; note = adenosine
  modified_base 13: mod_base = OTHER; note = 2'-O-methylthymidine
  modified_base 14: mod_base = OTHER; note = adenosine
  modified_base 15: mod_base = OTHER; note = adenosine
  modified_base 16: mod_base = OTHER; note = adenosine
  modified_base 17: mod_base = OTHER; note = adenosine
  modified_base 18: mod_base = OTHER; note = guanosine
  modified_base 19: mod_base = OTHER; note = guanosine
  modified_base 20: mod_base = OTHER; note = 2'-O-methylthymidine
  modified_base 21: mod_base = OTHER; note = 2'-O-methylthymidine
  source 1..21: mol_type = other DNA
ctgatgtttcaataaaaggtt

SEQ ID NO: 1865 - DNA, 21 bp, synthetic construct
  modified_base 1: mod_base = OTHER; note = 2'-O-methylthymidine
  modified_base 2: mod_base = OTHER; note = adenosine
  modified_base 3: mod_base = OTHER; note = adenosine
  modified_base 4: mod_base = OTHER; note = cytidine
  modified_base 5: mod_base = OTHER; note = thymidine
  modified_base 6: mod_base = OTHER; note = thymidine
  modified_base 7: mod_base = OTHER; note = 2'-O-methylthymidine
  modified_base 8: mod_base = OTHER; note = adenosine
  modified_base 9: mod_base = cm
  modified_base 10: mod_base = OTHER; note = adenosine
  modified_base 11: mod_base = OTHER; note = thymidine
  modified_base 12: mod_base = OTHER; note = thymidine
  modified_base 13: mod_base = cm
  modified_base 14: mod_base = OTHER; note = adenosine
  modified_base 15: mod_base = OTHER; note = thymidine
  modified_base 16: mod_base = cm
  modified_base 17: mod_base = OTHER; note = adenosine
  modified_base 18: mod_base = OTHER; note = guanosine
  modified_base 19: mod_base = OTHER; note = guanosine
  modified_base 20: mod_base = OTHER; note = 2'-O-methyluridine
  modified_base 21: mod_base = OTHER; note = 2'-O-methyluridine
  source 1..21: mol_type = other DNA
taactttacattcatcaggtt

SEQ ID NO: 1866 - DNA, 21 bp, synthetic construct
  modified_base 1: mod_base = OTHER; note = thymidine
  modified_base 2: mod_base = OTHER; note = adenosine
  modified_base 3: mod_base = OTHER; note = thymidine
  modified_base 4: mod_base = OTHER; note = cytidine
  modified_base 5: mod_base = OTHER; note = thymidine
  modified_base 6: mod_base = OTHER; note = thymidine
  modified_base 7: mod_base = OTHER; note = 2'-O-methylthymidine
  modified_base 8: mod_base = OTHER; note = adenosine
  modified_base 9: mod_base = OTHER; note = thymidine
  modified_base 10: mod_base = OTHER; note = 2'-O-methylthymidine
  modified_base 11: mod_base = OTHER; note = adenosine
  modified_base 12: mod_base = OTHER; note = adenosine
  modified_base 13: mod_base = OTHER; note = adenosine
  modified_base 14: mod_base = OTHER; note = thymidine
  modified_base 15: mod_base = OTHER; note = thymidine
  modified_base 16: mod_base = OTHER; note = cytidine
  modified_base 17: mod_base = OTHER; note = thymidine
  modified_base 18: mod_base = OTHER; note = cytidine
  modified_base 19: mod_base = OTHER; note = cytidine
  modified_base 20: mod_base = OTHER; note = 2'-O-methyluridine
  modified_base 21: mod_base = OTHER; note = 2'-O-methyluridine
  source 1..21: mol_type = other DNA
tatctttattaaattctcctt

SEQ ID NO: 1867 - DNA, 21 bp, synthetic construct
  modified_base 1: mod_base = OTHER; note = adenosine
  modified_base 2: mod_base = OTHER; note = adenosine
  modified_base 3: mod_base = OTHER; note = thymidine
  modified_base 4: mod_base = OTHER; note = cytidine
  modified_base 5: mod_base = OTHER; note = 2'-O-methylthymidine
  modified_base 6: mod_base = OTHER; note = adenosine
  modified_base 7: mod_base = OTHER; note = guanosine
  modified_base 8: mod_base = OTHER; note = thymidine
  modified_base 9: mod_base = OTHER; note = 2'-O-methylthymidine
  modified_base 10: mod_base = OTHER; note = adenosine
  modified_base 11: mod_base = OTHER; note = thymidine
  modified_base 12: mod_base = OTHER; note = guanosine
  modified_base 13: mod_base = OTHER; note = adenosine
  modified_base 14: mod_base = OTHER; note = cytidine
  modified_base 15: mod_base = OTHER; note = 2'-O-methylthymidine
  modified_base 16: mod_base = OTHER; note = adenosine
  modified_base 17: mod_base = OTHER; note = thymidine
  modified_base 18: mod_base = OTHER; note = thymidine
  modified_base 19: mod_base = OTHER; note = cytidine
  modified_base 20: mod_base = OTHER; note = 2'-O-methyluridine
  modified_base 21: mod_base = OTHER; note = 2'-O-methyluridine
  source 1..21: mol_type = other DNA
aatctagttatgactattctt

SEQ ID NO: 1868 - RNA, 12 nt, synthetic construct
  source 1..12: mol_type = other RNA
tgactgaatata

SEQ ID NO: 1869 - RNA, 12 nt, synthetic construct
  source 1..12: mol_type = other RNA
tatattcagtca

SEQ ID NO: 1870 - RNA, 12 nt, synthetic construct
  source 1..12: mol_type = other RNA
gactgaatataa

SEQ ID NO: 1871 - RNA, 12 nt, synthetic construct
  source 1..12: mol_type = other RNA
ttatattcagtc

SEQ ID NO: 1872 - RNA, 12 nt, synthetic construct
  source 1..12: mol_type = other RNA
actgaatataaa

SEQ ID NO: 1873 - RNA, 12 nt, synthetic construct
  source 1..12: mol_type = other RNA
tttatattcagt

SEQ ID NO: 1874 - RNA, 12 nt, synthetic construct
  source 1..12: mol_type = other RNA
ctgaatataaac

SEQ ID NO: 1875 - RNA, 12 nt, synthetic construct
  source 1..12: mol_type = other RNA
gtttatattcag

SEQ ID NO: 1876 - RNA, 12 nt, synthetic construct
  source 1..12: mol_type = other RNA
tgaatataaact

SEQ ID NO: 1877 - RNA, 12 nt, synthetic construct
  source 1..12: mol_type = other RNA
agtttatattca

SEQ ID NO: 1878 - RNA, 12 nt, synthetic construct
  source 1..12: mol_type = other RNA
gaatataaactt

SEQ ID NO: 1879 - RNA, 12 nt, synthetic construct
  source 1..12: mol_type = other RNA
aagtttatattc

SEQ ID NO: 1880 - RNA, 12 nt, synthetic construct
  source 1..12: mol_type = other RNA
aatataaacttg

SEQ ID NO: 1881 - RNA, 12 nt, synthetic construct
  source 1..12: mol_type = other RNA
caagtttatatt

SEQ ID NO: 1882 - RNA, 12 nt, synthetic construct
  source 1..12: mol_type = other RNA
atataaacttgt

SEQ ID NO: 1883 - RNA, 12 nt, synthetic construct
  source 1..12: mol_type = other RNA
acaagtttatat

SEQ ID NO: 1884 - RNA, 12 nt, synthetic construct
  source 1..12: mol_type = other RNA
tataaacttgtg

SEQ ID NO: 1885 - RNA, 12 nt, synthetic construct
  source 1..12: mol_type = other RNA
cacaagtttata

SEQ ID NO: 1886 - RNA, 12 nt, synthetic construct
  source 1..12: mol_type = other RNA
ataaacttgtgg

SEQ ID NO: 1887 - RNA, 12 nt, synthetic construct
  source 1..12: mol_type = other RNA
ccacaagtttat

SEQ ID NO: 1888 - RNA, 12 nt, synthetic construct
  source 1..12: mol_type = other RNA
taaacttgtggt

SEQ ID NO: 1889 - RNA, 12 nt, synthetic construct
  source 1..12: mol_type = other RNA
accacaagttta

SEQ ID NO: 1890 - RNA, 12 nt, synthetic construct
  source 1..12: mol_type = other RNA
aaacttgtggta

SEQ ID NO: 1891 - RNA, 12 nt, synthetic construct
  source 1..12: mol_type = other RNA
taccacaagttt

SEQ ID NO: 1892 - RNA, 12 nt, synthetic construct
  source 1..12: mol_type = other RNA
aacttgtggtag

SEQ ID NO: 1893 - RNA, 12 nt, synthetic construct
  source 1..12: mol_type = other RNA
ctaccacaagtt

SEQ ID NO: 1894 - RNA, 12 nt, synthetic construct
  source 1..12: mol_type = other RNA
acttgtggtagt

SEQ ID NO: 1895 - RNA, 12 nt, synthetic construct
  source 1..12: mol_type = other RNA
actaccacaagt

SEQ ID NO: 1896 - RNA, 12 nt, synthetic construct
  source 1..12: mol_type = other RNA
cttgtggtagtt

SEQ ID NO: 1897 - RNA, 12 nt, synthetic construct
  source 1..12: mol_type = other RNA
aactaccacaag

SEQ ID NO: 1898 - RNA, 12 nt, synthetic construct
  source 1..12: mol_type = other RNA
ttgtggtagttg

SEQ ID NO: 1899 - RNA, 12 nt, synthetic construct
  source 1..12: mol_type = other RNA
caactaccacaa

SEQ ID NO: 1900 - RNA, 12 nt, synthetic construct
  source 1..12: mol_type = other RNA
tgtggtagttgg

SEQ ID NO: 1901 - RNA, 12 nt, synthetic construct
  source 1..12: mol_type = other RNA
ccaactaccaca

SEQ ID NO: 1902 - RNA, 12 nt, synthetic construct
  source 1..12: mol_type = other RNA
gtggtagttgga

SEQ ID NO: 1903 - RNA, 12 nt, synthetic construct
  source 1..12: mol_type = other RNA
tccaactaccac

SEQ ID NO: 1904 - RNA, 12 nt, synthetic construct
  source 1..12: mol_type = other RNA
tggtagttggag

SEQ ID NO: 1905 - RNA, 12 nt, synthetic construct
  source 1..12: mol_type = other RNA
ctccaactacca

SEQ ID NO: 1906 - RNA, 12 nt, synthetic construct
  source 1..12: mol_type = other RNA
ggtagttggagc

SEQ ID NO: 1907 - RNA, 12 nt, synthetic construct
  source 1..12: mol_type = other RNA
gctccaactacc

SEQ ID NO: 1908 - RNA, 12 nt, synthetic construct
  source 1..12: mol_type = other RNA
gtagttggagct

SEQ ID NO: 1909 - RNA, 12 nt, synthetic construct
  source 1..12: mol_type = other RNA
agctccaactac

SEQ ID NO: 1910 - RNA, 12 nt, synthetic construct
  source 1..12: mol_type = other RNA
tagttggagctg

SEQ ID NO: 1911 - RNA, 12 nt, synthetic construct
  source 1..12: mol_type = other RNA
cagctccaacta

SEQ ID NO: 1912 - RNA, 12 nt, synthetic construct
  source 1..12: mol_type = other RNA
agttggagctgg

SEQ ID NO: 1913 - RNA, 12 nt, synthetic construct
  source 1..12: mol_type = other RNA
ccagctccaact

SEQ ID NO: 1914 - RNA, 12 nt, synthetic construct
  source 1..12: mol_type = other RNA
gttggagctggt

SEQ ID NO: 1915 - RNA, 12 nt, synthetic construct
  source 1..12: mol_type = other RNA
accagctccaac

SEQ ID NO: 1916 - RNA, 12 nt, synthetic construct
  source 1..12: mol_type = other RNA
ttggagctggtg

SEQ ID NO: 1917 - RNA, 12 nt, synthetic construct
  source 1..12: mol_type = other RNA
caccagctccaa

SEQ ID NO: 1918 - RNA, 12 nt, synthetic construct
  source 1..12: mol_type = other RNA
tggagctggtgg

SEQ ID NO: 1919 - RNA, 12 nt, synthetic construct
  source 1..12: mol_type = other RNA
ccaccagctcca

SEQ ID NO: 1920 - RNA, 12 nt, synthetic construct
  source 1..12: mol_type = other RNA
ggagctggtggc

SEQ ID NO: 1921 - RNA, 12 nt, synthetic construct
  source 1..12: mol_type = other RNA
gccaccagctcc

SEQ ID NO: 1922 - RNA, 12 nt, synthetic construct
  source 1..12: mol_type = other RNA
gagctggtggcg

SEQ ID NO: 1923 - RNA, 12 nt, synthetic construct
  source 1..12: mol_type = other RNA
cgccaccagctc

SEQ ID NO: 1924 - RNA, 12 nt, synthetic construct
  source 1..12: mol_type = other RNA
agctggtggcgt

SEQ ID NO: 1925 - RNA, 12 nt, synthetic construct
  source 1..12: mol_type = other RNA
acgccaccagct

SEQ ID NO: 1926 - RNA, 12 nt, synthetic construct
  source 1..12: mol_type = other RNA
gctggtggcgta

SEQ ID NO: 1927 - RNA, 12 nt, synthetic construct
  source 1..12: mol_type = other RNA
tacgccaccagc

SEQ ID NO: 1928 - RNA, 12 nt, synthetic construct
  source 1..12: mol_type = other RNA
ctggtggcgtag

SEQ ID NO: 1929 - RNA, 12 nt, synthetic construct
  source 1..12: mol_type = other RNA
ctacgccaccag

SEQ ID NO: 1930 - RNA, 12 nt, synthetic construct
  source 1..12: mol_type = other RNA
tggtggcgtagg

SEQ ID NO: 1931 - RNA, 12 nt, synthetic construct
  source 1..12: mol_type = other RNA
cctacgccacca

SEQ ID NO: 1932 - RNA, 12 nt, synthetic construct
  source 1..12: mol_type = other RNA
ggtggcgtaggc

SEQ ID NO: 1933 - RNA, 12 nt, synthetic construct
  source 1..12: mol_type = other RNA
gcctacgccacc

SEQ ID NO: 1934 - RNA, 12 nt, synthetic construct
  source 1..12: mol_type = other RNA
gtggcgtaggca

SEQ ID NO: 1935 - RNA, 12 nt, synthetic construct
  source 1..12: mol_type = other RNA
tgcctacgccac

SEQ ID NO: 1936 - RNA, 12 nt, synthetic construct
  source 1..12: mol_type = other RNA
tggcgtaggcaa

SEQ ID NO: 1937 - RNA, 12 nt, synthetic construct
  source 1..12: mol_type = other RNA
ttgcctacgcca

SEQ ID NO: 1938 - RNA, 12 nt, synthetic construct
  source 1..12: mol_type = other RNA
ggcgtaggcaag

SEQ ID NO: 1939 - RNA, 12 nt, synthetic construct
  source 1..12: mol_type = other RNA
cttgcctacgcc

SEQ ID NO: 1940 - RNA, 12 nt, synthetic construct
  source 1..12: mol_type = other RNA
gcgtaggcaaga

SEQ ID NO: 1941 - RNA, 12 nt, synthetic construct
  source 1..12: mol_type = other RNA
tcttgcctacgc

SEQ ID NO: 1942 - RNA, 12 nt, synthetic construct
  source 1..12: mol_type = other RNA
cgtaggcaagag

SEQ ID NO: 1943 - RNA, 12 nt, synthetic construct
  source 1..12: mol_type = other RNA
ctcttgcctacg

SEQ ID NO: 1944 - RNA, 12 nt, synthetic construct
  source 1..12: mol_type = other RNA
gtaggcaagagt

SEQ ID NO: 1945 - RNA, 12 nt, synthetic construct
  source 1..12: mol_type = other RNA
actcttgcctac

SEQ ID NO: 1946 - RNA, 12 nt, synthetic construct
  source 1..12: mol_type = other RNA
taggcaagagtg

SEQ ID NO: 1947 - RNA, 12 nt, synthetic construct
  source 1..12: mol_type = other RNA
cactcttgccta

SEQ ID NO: 1948 - RNA, 12 nt, synthetic construct
  source 1..12: mol_type = other RNA
aggcaagagtgc

SEQ ID NO: 1949 - RNA, 12 nt, synthetic construct
  source 1..12: mol_type = other RNA
gcactcttgcct

SEQ ID NO: 1950 - RNA, 12 nt, synthetic construct
  source 1..12: mol_type = other RNA
ggcaagagtgcc

SEQ ID NO: 1951 - RNA, 12 nt, synthetic construct
  source 1..12: mol_type = other RNA
ggcactcttgcc

SEQ ID NO: 1952 - RNA, 12 nt, synthetic construct
  source 1..12: mol_type = other RNA
gcaagagtgcct

SEQ ID NO: 1953 - RNA, 12 nt, synthetic construct
  source 1..12: mol_type = other RNA
aggcactcttgc

SEQ ID NO: 1954 - RNA, 12 nt, synthetic construct
  source 1..12: mol_type = other RNA
caagagtgcctt

SEQ ID NO: 1955 - RNA, 12 nt, synthetic construct
  source 1..12: mol_type = other RNA
aaggcactcttg

SEQ ID NO: 1956 - RNA, 12 nt, synthetic construct
  source 1..12: mol_type = other RNA
aagagtgccttg

SEQ ID NO: 1957 - RNA, 12 nt, synthetic construct
  source 1..12: mol_type = other RNA
caaggcactctt

SEQ ID NO: 1958 - RNA, 12 nt, synthetic construct
  source 1..12: mol_type = other RNA
agagtgccttga

SEQ ID NO: 1959 - RNA, 12 nt, synthetic construct
  source 1..12: mol_type = other RNA
tcaaggcactct

SEQ ID NO: 1960 - RNA, 12 nt, synthetic construct
  source 1..12: mol_type = other RNA
gagtgccttgac

SEQ ID NO: 1961 - RNA, 12 nt, synthetic construct
  source 1..12: mol_type = other RNA
gtcaaggcactc

SEQ ID NO: 1962 - RNA, 12 nt, synthetic construct
  source 1..12: mol_type = other RNA
agtgccttgacg

SEQ ID NO: 1963 - RNA, 12 nt, synthetic construct
  source 1..12: mol_type = other RNA
cgtcaaggcact

SEQ ID NO: 1964 - RNA, 12 nt, synthetic construct
  source 1..12: mol_type = other RNA
gtgccttgacga

SEQ ID NO: 1965 - RNA, 12 nt, synthetic construct
  source 1..12: mol_type = other RNA
tcgtcaaggcac

SEQ ID NO: 1966 - RNA, 12 nt, synthetic construct
  source 1..12: mol_type = other RNA
tgccttgacgat

SEQ ID NO: 1967 - RNA, 12 nt, synthetic construct
  source 1..12: mol_type = other RNA
atcgtcaaggca

SEQ ID NO: 1968 - RNA, 12 nt, synthetic construct
  source 1..12: mol_type = other RNA
gccttgacgata

SEQ ID NO: 1969 - RNA, 12 nt, synthetic construct
  source 1..12: mol_type = other RNA
tatcgtcaaggc

SEQ ID NO: 1970 - RNA, 12 nt, synthetic construct
  source 1..12: mol_type = other RNA
ccttgacgatac

SEQ ID NO: 1971 - RNA, 12 nt, synthetic construct
  source 1..12: mol_type = other RNA
gtatcgtcaagg

SEQ ID NO: 1972 - RNA, 12 nt, synthetic construct
  source 1..12: mol_type = other RNA
cttgacgataca

SEQ ID NO: 1973 - RNA, 12 nt, synthetic construct
  source 1..12: mol_type = other RNA
tgtatcgtcaag

SEQ ID NO: 1974 - RNA, 12 nt, synthetic construct
  source 1..12: mol_type = other RNA
ttgacgatacag

SEQ ID NO: 1975 - RNA, 12 nt, synthetic construct
  source 1..12: mol_type = other RNA
ctgtatcgtcaa

SEQ ID NO: 1976 - RNA, 12 nt, synthetic construct
  source 1..12: mol_type = other RNA
tgacgatacagc

SEQ ID NO: 1977 - RNA, 12 nt, synthetic construct
  source 1..12: mol_type = other RNA
gctgtatcgtca

SEQ ID NO: 1978 - RNA, 12 nt, synthetic construct
  source 1..12: mol_type = other RNA
gacgatacagct

SEQ ID NO: 1979 - RNA, 12 nt, synthetic construct
  source 1..12: mol_type = other RNA
agctgtatcgtc

SEQ ID NO: 1980 - RNA, 12 nt, synthetic construct
  source 1..12: mol_type = other RNA
acgatacagcta

SEQ ID NO: 1981 - RNA, 12 nt, synthetic construct
  source 1..12: mol_type = other RNA
tagctgtatcgt

SEQ ID NO: 1982 - RNA, 12 nt, synthetic construct
  source 1..12: mol_type = other RNA
cgatacagctaa

SEQ ID NO: 1983 - RNA, 12 nt, synthetic construct
  source 1..12: mol_type = other RNA
ttagctgtatcg

SEQ ID NO: 1984 - RNA, 12 nt, synthetic construct
  source 1..12: mol_type = other RNA
gatacagctaat

SEQ ID NO: 1985 - RNA, 12 nt, synthetic construct
  source 1..12: mol_type = other RNA
attagctgtatc

SEQ ID NO: 1986 - RNA, 12 nt, synthetic construct
  source 1..12: mol_type = other RNA
atacagctaatt

SEQ ID NO: 1987 - RNA, 12 nt, synthetic construct
  source 1..12: mol_type = other RNA
aattagctgtat

SEQ ID NO: 1988 - RNA, 12 nt, synthetic construct
  source 1..12: mol_type = other RNA
tacagctaattc

SEQ ID NO: 1989 - RNA, 12 nt, synthetic construct
  source 1..12: mol_type = other RNA
gaattagctgta

SEQ ID NO: 1990 - RNA, 12 nt, synthetic construct
  source 1..12: mol_type = other RNA
acagctaattca

SEQ ID NO: 1991 - RNA, 12 nt, synthetic construct
  source 1..12: mol_type = other RNA
tgaattagctgt

SEQ ID NO: 1992 - RNA, 12 nt, synthetic construct
  source 1..12: mol_type = other RNA
cagctaattcag

SEQ ID NO: 1993 - RNA, 12 nt, synthetic construct
  source 1..12: mol_type = other RNA
ctgaattagctg

SEQ ID NO: 1994 - RNA, 12 nt, synthetic construct
  source 1..12: mol_type = other RNA
agctaattcaga

SEQ ID NO: 1995 - RNA, 12 nt, synthetic construct
  source 1..12: mol_type = other RNA
tctgaattagct

SEQ ID NO: 1996 - RNA, 12 nt, synthetic construct
  source 1..12: mol_type = other RNA
gctaattcagaa

SEQ ID NO: 1997 - RNA, 12 nt, synthetic construct
  source 1..12: mol_type = other RNA
ttctgaattagc

SEQ ID NO: 1998 - RNA, 12 nt, synthetic construct
  source 1..12: mol_type = other RNA
ctaattcagaat

SEQ ID NO: 1999 - RNA, 12 nt, synthetic construct
  source 1..12: mol_type = other RNA
attctgaattag

SEQ ID NO: 2000 - RNA, 12 nt, synthetic construct
  source 1..12: mol_type = other RNA
taattcagaatc

SEQ ID NO: 2001 - RNA, 12 nt, synthetic construct
  source 1..12: mol_type = other RNA
gattctgaatta

SEQ ID NO: 2002 - RNA, 12 nt, synthetic construct
  source 1..12: mol_type = other RNA
aattcagaatca

SEQ ID NO: 2003 - RNA, 12 nt, synthetic construct
  source 1..12: mol_type = other RNA
tgattctgaatt

SEQ ID NO: 2004 - RNA, 12 nt, synthetic construct
  source 1..12: mol_type = other RNA
attcagaatcat

SEQ ID NO: 2005 - RNA, 12 nt, synthetic construct
  source 1..12: mol_type = other RNA
atgattctgaat

SEQ ID NO: 2006 - RNA, 12 nt, synthetic construct
  source 1..12: mol_type = other RNA
ttcagaatcatt

SEQ ID NO: 2007 - RNA, 12 nt, synthetic construct
  source 1..12: mol_type = other RNA
aatgattctgaa

SEQ ID NO: 2008 - RNA, 12 nt, synthetic construct
  source 1..12: mol_type = other RNA
tcagaatcattt

SEQ ID NO: 2009 - RNA, 12 nt, synthetic construct
  source 1..12: mol_type = other RNA
aaatgattctga

SEQ ID NO: 2010 - RNA, 12 nt, synthetic construct
  source 1..12: mol_type = other RNA
cagaatcatttt

SEQ ID NO: 2011 - RNA, 12 nt, synthetic construct
  source 1..12: mol_type = other RNA
aaaatgattctg

SEQ ID NO: 2012 - RNA, 12 nt, synthetic construct
  source 1..12: mol_type = other RNA
agaatcattttg

SEQ ID NO: 2013 - RNA, 12 nt, synthetic construct
  source 1..12: mol_type = other RNA
caaaatgattct

SEQ ID NO: 2014 - RNA, 12 nt, synthetic construct
  source 1..12: mol_type = other RNA
gaatcattttgt

SEQ ID NO: 2015 - RNA, 12 nt, synthetic construct
  source 1..12: mol_type = other RNA
acaaaatgattc

SEQ ID NO: 2016 - RNA, 12 nt, synthetic construct
  source 1..12: mol_type = other RNA
aatcattttgtg

SEQ ID NO: 2017 - RNA, 12 nt, synthetic construct
  source 1..12: mol_type = other RNA
cacaaaatgatt

SEQ ID NO: 2018 - RNA, 12 nt, synthetic construct
  source 1..12: mol_type = other RNA
atcattttgtgg

SEQ ID NO: 2019 - RNA, 12 nt, synthetic construct
  source 1..12: mol_type = other RNA
ccacaaaatgat

SEQ ID NO: 2020 - RNA, 12 nt, synthetic construct
  source 1..12: mol_type = other RNA
tcattttgtgga

SEQ ID NO: 2021 - RNA, 12 nt, synthetic construct
  source 1..12: mol_type = other RNA
tccacaaaatga

SEQ ID NO: 2022 - RNA, 12 nt, synthetic construct
  source 1..12: mol_type = other RNA
cattttgtggac

SEQ ID NO: 2023 - RNA, 12 nt, synthetic construct
  source 1..12: mol_type = other RNA
gtccacaaaatg

SEQ ID NO: 2024 - RNA, 12 nt, synthetic construct
  source 1..12: mol_type = other RNA
attttgtggacg

SEQ ID NO: 2025 - RNA, 12 nt, synthetic construct
  source 1..12: mol_type = other RNA
cgtccacaaaat

SEQ ID NO: 2026 - RNA, 12 nt, synthetic construct
  source 1..12: mol_type = other RNA
ttttgtggacga

SEQ ID NO: 2027 - RNA, 12 nt, synthetic construct
  source 1..12: mol_type = other RNA
tcgtccacaaaa

SEQ ID NO: 2028 - RNA, 12 nt, synthetic construct
  source 1..12: mol_type = other RNA
tttgtggacgaa

SEQ ID NO: 2029 - RNA, 12 nt, synthetic construct
  source 1..12: mol_type = other RNA
ttcgtccacaaa

SEQ ID NO: 2030 - RNA, 12 nt, synthetic construct
  source 1..12: mol_type = other RNA
ttgtggacgaat

SEQ ID NO: 2031 - RNA, 12 nt, synthetic construct
  source 1..12: mol_type = other RNA
attcgtccacaa

SEQ ID NO: 2032 - RNA, 12 nt, synthetic construct
  source 1..12: mol_type = other RNA
tgtggacgaata

SEQ ID NO: 2033 - RNA, 12 nt, synthetic construct
  source 1..12: mol_type = other RNA
tattcgtccaca

SEQ ID NO: 2034 - RNA, 12 nt, synthetic construct
  source 1..12: mol_type = other RNA
gtggacgaatat

SEQ ID NO: 2035 - RNA, 12 nt, synthetic construct
  source 1..12: mol_type = other RNA
atattcgtccac

SEQ ID NO: 2036 - RNA, 12 nt, synthetic construct
  source 1..12: mol_type = other RNA
tggacgaatatg

SEQ ID NO: 2037 - RNA, 12 nt, synthetic construct
  source 1..12: mol_type = other RNA
catattcgtcca

SEQ ID NO: 2038 - RNA, 12 nt, synthetic construct
  source 1..12: mol_type = other RNA
ggacgaatatga

SEQ ID NO: 2039 - RNA, 12 nt, synthetic construct
  source 1..12: mol_type = other RNA
tcatattcgtcc

SEQ ID NO: 2040 - RNA, 12 nt, synthetic construct
  source 1..12: mol_type = other RNA
gacgaatatgat

SEQ ID NO: 2041 - RNA, 12 nt, synthetic construct
  source 1..12: mol_type = other RNA
atcatattcgtc

SEQ ID NO: 2042 - RNA, 12 nt, synthetic construct
  source 1..12: mol_type = other RNA
acgaatatgatc

SEQ ID NO: 2043 - RNA, 12 nt, synthetic construct
  source 1..12: mol_type = other RNA
gatcatattcgt

SEQ ID NO: 2044 - RNA, 12 nt, synthetic construct
  source 1..12: mol_type = other RNA
cgaatatgatcc

SEQ ID NO: 2045 - RNA, 12 nt, synthetic construct
  source 1..12: mol_type = other RNA
ggatcatattcg

SEQ ID NO: 2046 - RNA, 12 nt, synthetic construct
  source 1..12: mol_type = other RNA
gaatatgatcca

SEQ ID NO: 2047 - RNA, 12 nt, synthetic construct
  source 1..12: mol_type = other RNA
tggatcatattc

SEQ ID NO: 2048 - RNA, 12 nt, synthetic construct
  source 1..12: mol_type = other RNA
aatatgatccaa

SEQ ID NO: 2049 - RNA, 12 nt, synthetic construct
  source 1..12: mol_type = other RNA
ttggatcatatt

SEQ ID NO: 2050 - RNA, 12 nt, synthetic construct
  source 1..12: mol_type = other RNA
atatgatccaac

SEQ ID NO: 2051 - RNA, 12 nt, synthetic construct
  source 1..12: mol_type = other RNA
gttggatcatat

SEQ ID NO: 2052 - RNA, 12 nt, synthetic construct
  source 1..12: mol_type = other RNA
tatgatccaaca

SEQ ID NO: 2053 - RNA, 12 nt, synthetic construct
  source 1..12: mol_type = other RNA
tgttggatcata

SEQ ID NO: 2054 - RNA, 12 nt, synthetic construct
  source 1..12: mol_type = other RNA
atgatccaacaa

SEQ ID NO: 2055 - RNA, 12 nt, synthetic construct
  source 1..12: mol_type = other RNA
ttgttggatcat

SEQ ID NO: 2056 - RNA, 12 nt, synthetic construct
  source 1..12: mol_type = other RNA
tgatccaacaat

SEQ ID NO: 2057 - RNA, 12 nt, synthetic construct
  source 1..12: mol_type = other RNA
attgttggatca

SEQ ID NO: 2058 - RNA, 12 nt, synthetic construct
  source 1..12: mol_type = other RNA
gatccaacaata

SEQ ID NO: 2059 - RNA, 12 nt, synthetic construct
  source 1..12: mol_type = other RNA
tattgttggatc

SEQ ID NO: 2060 - RNA, 12 nt, synthetic construct
  source 1..12: mol_type = other RNA
atccaacaatag

SEQ ID NO: 2061 - RNA, 12 nt, synthetic construct
  source 1..12: mol_type = other RNA
ctattgttggat

SEQ ID NO: 2062 - RNA, 12 nt, synthetic construct
  source 1..12: mol_type = other RNA
tccaacaataga

SEQ ID NO: 2063 - RNA, 12 nt, synthetic construct
  source 1..12: mol_type = other RNA
tctattgttgga

SEQ ID NO: 2064 - RNA, 12 nt, synthetic construct
  source 1..12: mol_type = other RNA
ccaacaatagag

SEQ ID NO: 2065 - RNA, 12 nt, synthetic construct
  source 1..12: mol_type = other RNA
ctctattgttgg

SEQ ID NO: 2066 - RNA, 12 nt, synthetic construct
  source 1..12: mol_type = other RNA
caacaatagagg

SEQ ID NO: 2067 - RNA, 12 nt, synthetic construct
  source 1..12: mol_type = other RNA
cctctattgttg

SEQ ID NO: 2068 - RNA, 12 nt, synthetic construct
  source 1..12: mol_type = other RNA
aacaatagagga

SEQ ID NO: 2069 - RNA, 12 nt, synthetic construct
  source 1..12: mol_type = other RNA
tcctctattgtt

SEQ ID NO: 2070 - RNA, 12 nt, synthetic construct
  source 1..12: mol_type = other RNA
acaatagaggat

SEQ ID NO: 2071 - RNA, 12 nt, synthetic construct
  source 1..12: mol_type = other RNA
atcctctattgt

SEQ ID NO: 2072 - RNA, 12 nt, synthetic construct
  source 1..12: mol_type = other RNA
caatagaggatt

SEQ ID NO: 2073 - RNA, 12 nt, synthetic construct
  source 1..12: mol_type = other RNA
aatcctctattg

SEQ ID NO: 2074 - RNA, 12 nt, synthetic construct
  source 1..12: mol_type = other RNA
aatagaggattc

SEQ ID NO: 2075 - RNA, 12 nt, synthetic construct
  source 1..12: mol_type = other RNA
gaatcctctatt

SEQ ID NO: 2076 - RNA, 12 nt, synthetic construct
  source 1..12: mol_type = other RNA
atagaggattcc

SEQ ID NO: 2077 - RNA, 12 nt, synthetic construct
  source 1..12: mol_type = other RNA
ggaatcctctat

SEQ ID NO: 2078 - RNA, 12 nt, synthetic construct
  source 1..12: mol_type = other RNA
tagaggattcct

SEQ ID NO: 2079 - RNA, 12 nt, synthetic construct
  source 1..12: mol_type = other RNA
aggaatcctcta

SEQ ID NO: 2080 - RNA, 12 nt, synthetic construct
  source 1..12: mol_type = other RNA
agaggattccta

SEQ ID NO: 2081 - RNA, 12 nt, synthetic construct
  source 1..12: mol_type = other RNA
taggaatcctct

SEQ ID NO: 2082 - RNA, 12 nt, synthetic construct
  source 1..12: mol_type = other RNA
gaggattcctac

SEQ ID NO: 2083 - RNA, 12 nt, synthetic construct
  source 1..12: mol_type = other RNA
gtaggaatcctc

SEQ ID NO: 2084 - RNA, 12 nt, synthetic construct
  source 1..12: mol_type = other RNA
aggattcctaca

SEQ ID NO: 2085 - RNA, 12 nt, synthetic construct
  source 1..12: mol_type = other RNA
tgtaggaatcct

SEQ ID NO: 2086 - RNA, 12 nt, synthetic construct
  source 1..12: mol_type = other RNA
ggattcctacag

SEQ ID NO: 2087 - RNA, 12 nt, synthetic construct
  source 1..12: mol_type = other RNA
ctgtaggaatcc

SEQ ID NO: 2088 - RNA, 12 nt, synthetic construct
  source 1..12: mol_type = other RNA
gattcctacagg

SEQ ID NO: 2089 - RNA, 12 nt, synthetic construct
  source 1..12: mol_type = other RNA
cctgtaggaatc

SEQ ID NO: 2090 - RNA, 12 nt, synthetic construct
  source 1..12: mol_type = other RNA
attcctacagga

SEQ ID NO: 2091 - RNA, 12 nt, synthetic construct
  source 1..12: mol_type = other RNA
tcctgtaggaat

SEQ ID NO: 2092 - RNA, 12 nt, synthetic construct
  source 1..12: mol_type = other RNA
ttcctacaggaa

SEQ ID NO: 2093 - RNA, 12 nt, synthetic construct
  source 1..12: mol_type = other RNA
ttcctgtaggaa

SEQ ID NO: 2094 - RNA, 12 nt, synthetic construct
  source 1..12: mol_type = other RNA
tcctacaggaag

SEQ ID NO: 2095 - RNA, 12 nt, synthetic construct
  source 1..12: mol_type = other RNA
cttcctgtagga

SEQ ID NO: 2096 - RNA, 12 nt, synthetic construct
  source 1..12: mol_type = other RNA
cctacaggaagc

SEQ ID NO: 2097 - RNA, 12 nt, synthetic construct
  source 1..12: mol_type = other RNA
gcttcctgtagg

SEQ ID NO: 2098 - RNA, 12 nt, synthetic construct
  source 1..12: mol_type = other RNA
ctacaggaagca

SEQ ID NO: 2099 - RNA, 12 nt, synthetic construct
  source 1..12: mol_type = other RNA
tgcttcctgtag

SEQ ID NO: 2100 - RNA, 12 nt, synthetic construct
  source 1..12: mol_type = other RNA
tacaggaagcaa

SEQ ID NO: 2101 - RNA, 12 nt, synthetic construct
  source 1..12: mol_type = other RNA
ttgcttcctgta

SEQ ID NO: 2102 - RNA, 12 nt, synthetic construct
  source 1..12: mol_type = other RNA
acaggaagcaag

SEQ ID NO: 2103 - RNA, 12 nt, synthetic construct
  source 1..12: mol_type = other RNA
cttgcttcctgt

SEQ ID NO: 2104 - RNA, 12 nt, synthetic construct
  source 1..12: mol_type = other RNA
caggaagcaagt

SEQ ID NO: 2105 - RNA, 12 nt, synthetic construct
  source 1..12: mol_type = other RNA
acttgcttcctg

SEQ ID NO: 2106 - RNA, 12 nt, synthetic construct
  source 1..12: mol_type = other RNA
aggaagcaagta

SEQ ID NO: 2107 - RNA, 12 nt, synthetic construct
  source 1..12: mol_type = other RNA
tacttgcttcct

SEQ ID NO: 2108 - RNA, 12 nt, synthetic construct
  source 1..12: mol_type = other RNA
ggaagcaagtag

SEQ ID NO: 2109 - RNA, 12 nt, synthetic construct
  source 1..12: mol_type = other RNA
ctacttgcttcc

SEQ ID NO: 2110 - RNA, 12 nt, synthetic construct
  source 1..12: mol_type = other RNA
gaagcaagtagt

SEQ ID NO: 2111 - RNA, 12 nt, synthetic construct
  source 1..12: mol_type = other RNA
actacttgcttc

SEQ ID NO: 2112 - RNA, 12 nt, synthetic construct
  source 1..12: mol_type = other RNA
aagcaagtagta

SEQ ID NO: 2113 - RNA, 12 nt, synthetic construct
  source 1..12: mol_type = other RNA
tactacttgctt

SEQ ID NO: 2114 - RNA, 12 nt, synthetic construct
  source 1..12: mol_type = other RNA
agcaagtagtaa

SEQ ID NO: 2115 - RNA, 12 nt, synthetic construct
  source 1..12: mol_type = other RNA
ttactacttgct

SEQ ID NO: 2116 - RNA, 12 nt, synthetic construct
  source 1..12: mol_type = other RNA
gcaagtagtaat

SEQ ID NO: 2117 - RNA, 12 nt, synthetic construct
  source 1..12: mol_type = other RNA
attactacttgc

SEQ ID NO: 2118 - RNA, 12 nt, synthetic construct
  source 1..12: mol_type = other RNA
caagtagtaatt

SEQ ID NO: 2119 - RNA, 12 nt, synthetic construct
  source 1..12: mol_type = other RNA
aattactacttg

SEQ ID NO: 2120 - RNA, 12 nt, synthetic construct
  source 1..12: mol_type = other RNA
aagtagtaattg

SEQ ID NO: 2121 - RNA, 12 nt, synthetic construct
  source 1..12: mol_type = other RNA
caattactactt

SEQ ID NO: 2122 - RNA, 12 nt, synthetic construct
  source 1..12: mol_type = other RNA
agtagtaattga

SEQ ID NO: 2123 - RNA, 12 nt, synthetic construct
  source 1..12: mol_type = other RNA
tcaattactact

SEQ ID NO: 2124 - RNA, 12 nt, synthetic construct
  source 1..12: mol_type = other RNA
gtagtaattgat

SEQ ID NO: 2125 - RNA, 12 nt, synthetic construct
  source 1..12: mol_type = other RNA
atcaattactac

SEQ ID NO: 2126 - RNA, 12 nt, synthetic construct
  source 1..12: mol_type = other RNA
tagtaattgatg

SEQ ID NO: 2127 - RNA, 12 nt, synthetic construct
  source 1..12: mol_type = other RNA
catcaattacta

SEQ ID NO: 2128 - RNA, 12 nt, synthetic construct
  source 1..12: mol_type = other RNA
agtaattgatgg

SEQ ID NO: 2129 - RNA, 12 nt, synthetic construct
  source 1..12: mol_type = other RNA
ccatcaattact

SEQ ID NO: 2130 - RNA, 12 nt, synthetic construct
  source 1..12: mol_type = other RNA
gtaattgatgga

SEQ ID NO: 2131 - RNA, 12 nt, synthetic construct
  source 1..12: mol_type = other RNA
tccatcaattac

SEQ ID NO: 2132 - RNA, 12 nt, synthetic construct
  source 1..12: mol_type = other RNA
taattgatggag

SEQ ID NO: 2133 - RNA, 12 nt, synthetic construct
  source 1..12: mol_type = other RNA
ctccatcaatta

SEQ ID NO: 2134 - RNA, 12 nt, synthetic construct
  source 1..12: mol_type = other RNA
aattgatggaga

SEQ ID NO: 2135 - RNA, 12 nt, synthetic construct
  source 1..12: mol_type = other RNA
tctccatcaatt

SEQ ID NO: 2136 - RNA, 12 nt, synthetic construct
  source 1..12: mol_type = other RNA
attgatggagaa

SEQ ID NO: 2137 - RNA, 12 nt, synthetic construct
  source 1..12: mol_type = other RNA
ttctccatcaat

SEQ ID NO: 2138 - RNA, 12 nt, synthetic construct
  source 1..12: mol_type = other RNA
ttgatggagaaa

SEQ ID NO: 2139 - RNA, 12 nt, synthetic construct
  source 1..12: mol_type = other RNA
tttctccatcaa

SEQ ID NO: 2140 - RNA, 12 nt, synthetic construct
  source 1..12: mol_type = other RNA
tgatggagaaac

SEQ ID NO: 2141 - RNA, 12 nt, synthetic construct
  source 1..12: mol_type = other RNA
gtttctccatca

SEQ ID NO: 2142 - RNA, 12 nt, synthetic construct
  source 1..12: mol_type = other RNA
gatggagaaacc

SEQ ID NO: 2143 - RNA, 12 nt, synthetic construct
  source 1..12: mol_type = other RNA
ggtttctccatc

SEQ ID NO: 2144 - RNA, 12 nt, synthetic construct
  source 1..12: mol_type = other RNA
atggagaaacct

SEQ ID NO: 2145 - RNA, 12 nt, synthetic construct
  source 1..12: mol_type = other RNA
aggtttctccat

SEQ ID NO: 2146 - RNA, 12 nt, synthetic construct
  source 1..12: mol_type = other RNA
tggagaaacctg

SEQ ID NO: 2147 - RNA, 12 nt, synthetic construct
  source 1..12: mol_type = other RNA
caggtttctcca

SEQ ID NO: 2148 - RNA, 12 nt, synthetic construct
  source 1..12: mol_type = other RNA
ggagaaacctgt

SEQ ID NO: 2149 - RNA, 12 nt, synthetic construct
  source 1..12: mol_type = other RNA
acaggtttctcc

SEQ ID NO: 2150 - RNA, 12 nt, synthetic construct
  source 1..12: mol_type = other RNA
gagaaacctgtc

SEQ ID NO: 2151 - RNA, 12 nt, synthetic construct
  source 1..12: mol_type = other RNA
gacaggtttctc

SEQ ID NO: 2152 - RNA, 12 nt, synthetic construct
  source 1..12: mol_type = other RNA
agaaacctgtct

SEQ ID NO: 2153 - RNA, 12 nt, synthetic construct
  source 1..12: mol_type = other RNA
agacaggtttct

SEQ ID NO: 2154 - RNA, 12 nt, synthetic construct
  source 1..12: mol_type = other RNA
gaaacctgtctc

SEQ ID NO: 2155 - RNA, 12 nt, synthetic construct
  source 1..12: mol_type = other RNA
gagacaggtttc

SEQ ID NO: 2156 - RNA, 12 nt, synthetic construct
  source 1..12: mol_type = other RNA
aaacctgtctct

SEQ ID NO: 2157 - RNA, 12 nt, synthetic construct
  source 1..12: mol_type = other RNA
agagacaggttt

SEQ ID NO: 2158 - RNA, 12 nt, synthetic construct
  source 1..12: mol_type = other RNA
aacctgtctctt

SEQ ID NO: 2159 - RNA, 12 nt, synthetic construct
  source 1..12: mol_type = other RNA
aagagacaggtt

SEQ ID NO: 2160 - RNA, 12 nt, synthetic construct
  source 1..12: mol_type = other RNA
acctgtctcttg

SEQ ID NO: 2161 - RNA, 12 nt, synthetic construct
  source 1..12: mol_type = other RNA
caagagacaggt

SEQ ID NO: 2162 - RNA, 12 nt, synthetic construct
  source 1..12: mol_type = other RNA
cctgtctcttgg

SEQ ID NO: 2163 - RNA, 12 nt, synthetic construct
  source 1..12: mol_type = other RNA
ccaagagacagg

SEQ ID NO: 2164 - RNA, 12 nt, synthetic construct
  source 1..12: mol_type = other RNA
ctgtctcttgga

SEQ ID NO: 2165 - RNA, 12 nt, synthetic construct
  source 1..12: mol_type = other RNA
tccaagagacag

SEQ ID NO: 2166 - RNA, 12 nt, synthetic construct
  source 1..12: mol_type = other RNA
tgtctcttggat

SEQ ID NO: 2167 - RNA, 12 nt, synthetic construct
  source 1..12: mol_type = other RNA
atccaagagaca

SEQ ID NO: 2168 - RNA, 12 nt, synthetic construct
  source 1..12: mol_type = other RNA
gtctcttggata

SEQ ID NO: 2169 - RNA, 12 nt, synthetic construct
  source 1..12: mol_type = other RNA
tatccaagagac

SEQ ID NO: 2170 - RNA, 12 nt, synthetic construct
  source 1..12: mol_type = other RNA
tctcttggatat

SEQ ID NO: 2171 - RNA, 12 nt, synthetic construct
  source 1..12: mol_type = other RNA
atatccaagaga

SEQ ID NO: 2172 - RNA, 12 nt, synthetic construct
  source 1..12: mol_type = other RNA
ctcttggatatt

SEQ ID NO: 2173 - RNA, 12 nt, synthetic construct
  source 1..12: mol_type = other RNA
aatatccaagag

SEQ ID NO: 2174 - RNA, 12 nt, synthetic construct
  source 1..12: mol_type = other RNA
tcttggatattc

SEQ ID NO: 2175 - RNA, 12 nt, synthetic construct
  source 1..12: mol_type = other RNA
gaatatccaaga

SEQ ID NO: 2176 - RNA, 12 nt, synthetic construct
  source 1..12: mol_type = other RNA
cttggatattct

SEQ ID NO: 2177 - RNA, 12 nt, synthetic construct
  source 1..12: mol_type = other RNA
agaatatccaag

SEQ ID NO: 2178 - RNA, 12 nt, synthetic construct
  source 1..12: mol_type = other RNA
ttggatattctc

SEQ ID NO: 2179 - RNA, 12 nt, synthetic construct
  source 1..12: mol_type = other RNA
gagaatatccaa

SEQ ID NO: 2180 - RNA, 12 nt, synthetic construct
  source 1..12: mol_type = other RNA
tggatattctcg

SEQ ID NO: 2181 - RNA, 12 nt, synthetic construct
  source 1..12: mol_type = other RNA
cgagaatatcca

SEQ ID NO: 2182 - RNA, 12 nt, synthetic construct
  source 1..12: mol_type = other RNA
ggatattctcga

SEQ ID NO: 2183 - RNA, 12 nt, synthetic construct
  source 1..12: mol_type = other RNA
tcgagaatatcc

SEQ ID NO: 2184 - RNA, 12 nt, synthetic construct
  source 1..12: mol_type = other RNA
gatattctcgac

SEQ ID NO: 2185 - RNA, 12 nt, synthetic construct
  source 1..12: mol_type = other RNA
gtcgagaatatc

SEQ ID NO: 2186 - RNA, 12 nt, synthetic construct
  source 1..12: mol_type = other RNA
atattctcgaca

SEQ ID NO: 2187 - RNA, 12 nt, synthetic construct
  source 1..12: mol_type = other RNA
tgtcgagaatat

SEQ ID NO: 2188 - RNA, 12 nt, synthetic construct
  source 1..12: mol_type = other RNA
tattctcgacac

SEQ ID NO: 2189 - RNA, 12 nt, synthetic construct
  source 1..12: mol_type = other RNA
gtgtcgagaata

SEQ ID NO: 2190 - RNA, 12 nt, synthetic construct
  source 1..12: mol_type = other RNA
attctcgacaca

SEQ ID NO: 2191 - RNA, 12 nt, synthetic construct
  source 1..12: mol_type = other RNA
tgtgtcgagaat

SEQ ID NO: 2192 - RNA, 12 nt, synthetic construct
  source 1..12: mol_type = other RNA
ttctcgacacag

SEQ ID NO: 2193 - RNA, 12 nt, synthetic construct
  source 1..12: mol_type = other RNA
ctgtgtcgagaa

SEQ ID NO: 2194 - RNA, 12 nt, synthetic construct
  source 1..12: mol_type = other RNA
tctcgacacagc

SEQ ID NO: 2195 - RNA, 12 nt, synthetic construct
  source 1..12: mol_type = other RNA
gctgtgtcgaga

SEQ ID NO: 2196 - RNA, 12 nt, synthetic construct
  source 1..12: mol_type = other RNA
ctcgacacagca

SEQ ID NO: 2197 - RNA, 12 nt, synthetic construct
  source 1..12: mol_type = other RNA
tgctgtgtcgag

SEQ ID NO: 2198 - RNA, 12 nt, synthetic construct
  source 1..12: mol_type = other RNA
tcgacacagcag

SEQ ID NO: 2199 - RNA, 12 nt, synthetic construct
  source 1..12: mol_type = other RNA
ctgctgtgtcga

SEQ ID NO: 2200 - RNA, 12 nt, synthetic construct
  source 1..12: mol_type = other RNA
cgacacagcagg

SEQ ID NO: 2201 - RNA, 12 nt, synthetic construct
  source 1..12: mol_type = other RNA
cctgctgtgtcg

SEQ ID NO: 2202 - RNA, 12 nt, synthetic construct
  source 1..12: mol_type = other RNA
gacacagcaggt

SEQ ID NO: 2203 - RNA, 12 nt, synthetic construct
  source 1..12: mol_type = other RNA
acctgctgtgtc

SEQ ID NO: 2204 - RNA, 12 nt, synthetic construct
  source 1..12: mol_type = other RNA
acacagcaggtc

SEQ ID NO: 2205 - RNA, 12 nt, synthetic construct
  source 1..12: mol_type = other RNA
gacctgctgtgt

SEQ ID NO: 2206 - RNA, 12 nt, synthetic construct
  source 1..12: mol_type = other RNA
cacagcaggtca

SEQ ID NO: 2207 - RNA, 12 nt, synthetic construct
  source 1..12: mol_type = other RNA
tgacctgctgtg

SEQ ID NO: 2208 - RNA, 12 nt, synthetic construct
  source 1..12: mol_type = other RNA
acagcaggtcaa

SEQ ID NO: 2209 - RNA, 12 nt, synthetic construct
  source 1..12: mol_type = other RNA
ttgacctgctgt

SEQ ID NO: 2210 - RNA, 12 nt, synthetic construct
  source 1..12: mol_type = other RNA
cagcaggtcaag

SEQ ID NO: 2211 - RNA, 12 nt, synthetic construct
  source 1..12: mol_type = other RNA
cttgacctgctg

SEQ ID NO: 2212 - RNA, 12 nt, synthetic construct
  source 1..12: mol_type = other RNA
agcaggtcaaga

SEQ ID NO: 2213 - RNA, 12 nt, synthetic construct
  source 1..12: mol_type = other RNA
tcttgacctgct

SEQ ID NO: 2214 - RNA, 12 nt, synthetic construct
  source 1..12: mol_type = other RNA
gcaggtcaagag

SEQ ID NO: 2215 - RNA, 12 nt, synthetic construct
  source 1..12: mol_type = other RNA
ctcttgacctgc

SEQ ID NO: 2216 - RNA, 12 nt, synthetic construct
  source 1..12: mol_type = other RNA
caggtcaagagg

SEQ ID NO: 2217 - RNA, 12 nt, synthetic construct
  source 1..12: mol_type = other RNA
cctcttgacctg

SEQ ID NO: 2218 - RNA, 12 nt, synthetic construct
  source 1..12: mol_type = other RNA
aggtcaagagga

SEQ ID NO: 2219 - RNA, 12 nt, synthetic construct
  source 1..12: mol_type = other RNA
tcctcttgacct

SEQ ID NO: 2220 - RNA, 12 nt, synthetic construct
  source 1..12: mol_type = other RNA
ggtcaagaggag

SEQ ID NO: 2221 - RNA, 12 nt, synthetic construct
  source 1..12: mol_type = other RNA
ctcctcttgacc

SEQ ID NO: 2222 - RNA, 12 nt, synthetic construct
  source 1..12: mol_type = other RNA
gtcaagaggagt

SEQ ID NO: 2223 - RNA, 12 nt, synthetic construct
  source 1..12: mol_type = other RNA
actcctcttgac

SEQ ID NO: 2224 - RNA, 12 nt, synthetic construct
  source 1..12: mol_type = other RNA
tcaagaggagta

SEQ ID NO: 2225 - RNA, 12 nt, synthetic construct
  source 1..12: mol_type = other RNA
tactcctcttga

SEQ ID NO: 2226 - RNA, 12 nt, synthetic construct
  source 1..12: mol_type = other RNA
caagaggagtac

SEQ ID NO: 2227 - RNA, 12 nt, synthetic construct
  source 1..12: mol_type = other RNA
gtactcctcttg

SEQ ID NO: 2228 - RNA, 12 nt, synthetic construct
  source 1..12: mol_type = other RNA
aagaggagtaca

SEQ ID NO: 2229 - RNA, 12 nt, synthetic construct
  source 1..12: mol_type = other RNA
tgtactcctctt

SEQ ID NO: 2230 - RNA, 12 nt, synthetic construct
  source 1..12: mol_type = other RNA
agaggagtacag

SEQ ID NO: 2231 - RNA, 12 nt, synthetic construct
  source 1..12: mol_type = other RNA
ctgtactcctct

SEQ ID NO: 2232 - RNA, 12 nt, synthetic construct
  source 1..12: mol_type = other RNA
gaggagtacagt

SEQ ID NO: 2233 - RNA, 12 nt, synthetic construct
  source 1..12: mol_type = other RNA
actgtactcctc

SEQ ID NO: 2234 - RNA, 12 nt, synthetic construct
  source 1..12: mol_type = other RNA
aggagtacagtg

SEQ ID NO: 2235 - RNA, 12 nt, synthetic construct
  source 1..12: mol_type = other RNA
cactgtactcct

SEQ ID NO: 2236 - RNA, 12 nt, synthetic construct
  source 1..12: mol_type = other RNA
ggagtacagtgc

SEQ ID NO: 2237 - RNA, 12 nt, synthetic construct
  source 1..12: mol_type = other RNA
gcactgtactcc

SEQ ID NO: 2238 - RNA, 12 nt, synthetic construct
  source 1..12: mol_type = other RNA
gagtacagtgca

SEQ ID NO: 2239 - RNA, 12 nt, synthetic construct
  source 1..12: mol_type = other RNA
tgcactgtactc

SEQ ID NO: 2240 - RNA, 12 nt, synthetic construct
  source 1..12: mol_type = other RNA
agtacagtgcaa

SEQ ID NO: 2241 - RNA, 12 nt, synthetic construct
  source 1..12: mol_type = other RNA
ttgcactgtact

SEQ ID NO: 2242 - RNA, 12 nt, synthetic construct
  source 1..12: mol_type = other RNA
gtacagtgcaat

SEQ ID NO: 2243 - RNA, 12 nt, synthetic construct
  source 1..12: mol_type = other RNA
attgcactgtac

SEQ ID NO: 2244 - RNA, 12 nt, synthetic construct
  source 1..12: mol_type = other RNA
tacagtgcaatg

SEQ ID NO: 2245 - RNA, 12 nt, synthetic construct
  source 1..12: mol_type = other RNA
cattgcactgta

SEQ ID NO: 2246 - RNA, 12 nt, synthetic construct
  source 1..12: mol_type = other RNA
acagtgcaatga

SEQ ID NO: 2247 - RNA, 12 nt, synthetic construct
  source 1..12: mol_type = other RNA
tcattgcactgt

SEQ ID NO: 2248 - RNA, 12 nt, synthetic construct
  source 1..12: mol_type = other RNA
cagtgcaatgag

SEQ ID NO: 2249 - RNA, 12 nt, synthetic construct
  source 1..12: mol_type = other RNA
ctcattgcactg

SEQ ID NO: 2250 - RNA, 12 nt, synthetic construct
  source 1..12: mol_type = other RNA
agtgcaatgagg

SEQ ID NO: 2251 - RNA, 12 nt, synthetic construct
  source 1..12: mol_type = other RNA
cctcattgcact

SEQ ID NO: 2252 - RNA, 12 nt, synthetic construct
  source 1..12: mol_type = other RNA
gtgcaatgaggg

SEQ ID NO: 2253 - RNA, 12 nt, synthetic construct
  source 1..12: mol_type = other RNA
ccctcattgcac

SEQ ID NO: 2254 - RNA, 12 nt, synthetic construct
  source 1..12: mol_type = other RNA
tgcaatgaggga

SEQ ID NO: 2255 - RNA, 12 nt, synthetic construct
  source 1..12: mol_type = other RNA
tccctcattgca

SEQ ID NO: 2256 - RNA, 12 nt, synthetic construct
  source 1..12: mol_type = other RNA
gcaatgagggac

SEQ ID NO: 2257 - RNA, 12 nt, synthetic construct
  source 1..12: mol_type = other RNA
gtccctcattgc

SEQ ID NO: 2258 - RNA, 12 nt, synthetic construct
  source 1..12: mol_type = other RNA
caatgagggacc

SEQ ID NO: 2259 - RNA, 12 nt, synthetic construct
  source 1..12: mol_type = other RNA
ggtccctcattg

SEQ ID NO: 2260 - RNA, 12 nt, synthetic construct
  source 1..12: mol_type = other RNA
aatgagggacca

SEQ ID NO: 2261 - RNA, 12 nt, synthetic construct
  source 1..12: mol_type = other RNA
tggtccctcatt

SEQ ID NO: 2262 - RNA, 12 nt, synthetic construct
  source 1..12: mol_type = other RNA
atgagggaccag

SEQ ID NO: 2263 - RNA, 12 nt, synthetic construct
  source 1..12: mol_type = other RNA
ctggtccctcat

SEQ ID NO: 2264 - RNA, 12 nt, synthetic construct
  source 1..12: mol_type = other RNA
tgagggaccagt

SEQ ID NO: 2265 - RNA, 12 nt, synthetic construct
  source 1..12: mol_type = other RNA
actggtccctca

SEQ ID NO: 2266 - RNA, 12 nt, synthetic construct
  source 1..12: mol_type = other RNA
gagggaccagta

SEQ ID NO: 2267 - RNA, 12 nt, synthetic construct
  source 1..12: mol_type = other RNA
tactggtccctc

SEQ ID NO: 2268 - RNA, 12 nt, synthetic construct
  source 1..12: mol_type = other RNA
agggaccagtac

SEQ ID NO: 2269 - RNA, 12 nt, synthetic construct
  source 1..12: mol_type = other RNA
gtactggtccct

SEQ ID NO: 2270 - RNA, 12 nt, synthetic construct
  source 1..12: mol_type = other RNA
gggaccagtaca

SEQ ID NO: 2271 - RNA, 12 nt, synthetic construct
  source 1..12: mol_type = other RNA
tgtactggtccc

SEQ ID NO: 2272 - RNA, 12 nt, synthetic construct
  source 1..12: mol_type = other RNA
ggaccagtacat

SEQ ID NO: 2273 - RNA, 12 nt, synthetic construct
  source 1..12: mol_type = other RNA
atgtactggtcc

SEQ ID NO: 2274 - RNA, 12 nt, synthetic construct
  source 1..12: mol_type = other RNA
gaccagtacatg

SEQ ID NO: 2275 - RNA, 12 nt, synthetic construct
  source 1..12: mol_type = other RNA
catgtactggtc

SEQ ID NO: 2276 - RNA, 12 nt, synthetic construct
  source 1..12: mol_type = other RNA
accagtacatga

SEQ ID NO: 2277 - RNA, 12 nt, synthetic construct
  source 1..12: mol_type = other RNA
tcatgtactggt

SEQ ID NO: 2278 - RNA, 12 nt, synthetic construct
  source 1..12: mol_type = other RNA
ccagtacatgag

SEQ ID NO: 2279 - RNA, 12 nt, synthetic construct
  source 1..12: mol_type = other RNA
ctcatgtactgg

SEQ ID NO: 2280 - RNA, 12 nt, synthetic construct
  source 1..12: mol_type = other RNA
cagtacatgagg

SEQ ID NO: 2281 - RNA, 12 nt, synthetic construct
  source 1..12: mol_type = other RNA
cctcatgtactg

SEQ ID NO: 2282 - RNA, 12 nt, synthetic construct
  source 1..12: mol_type = other RNA
agtacatgagga

SEQ ID NO: 2283 - RNA, 12 nt, synthetic construct
  source 1..12: mol_type = other RNA
tcctcatgtact

SEQ ID NO: 2284 - RNA, 12 nt, synthetic construct
  source 1..12: mol_type = other RNA
gtacatgaggac

SEQ ID NO: 2285 - RNA, 12 nt, synthetic construct
  source 1..12: mol_type = other RNA
gtcctcatgtac

SEQ ID NO: 2286 - RNA, 12 nt, synthetic construct
  source 1..12: mol_type = other RNA
tacatgaggact

SEQ ID NO: 2287 - RNA, 12 nt, synthetic construct
  source 1..12: mol_type = other RNA
agtcctcatgta

SEQ ID NO: 2288 - RNA, 12 nt, synthetic construct
  source 1..12: mol_type = other RNA
acatgaggactg

SEQ ID NO: 2289 - RNA, 12 nt, synthetic construct
  source 1..12: mol_type = other RNA
cagtcctcatgt

SEQ ID NO: 2290 - RNA, 12 nt, synthetic construct
  source 1..12: mol_type = other RNA
catgaggactgg

SEQ ID NO: 2291 - RNA, 12 nt, synthetic construct
  source 1..12: mol_type = other RNA
ccagtcctcatg

SEQ ID NO: 2292 - RNA, 12 nt, synthetic construct
  source 1..12: mol_type = other RNA
atgaggactggg

SEQ ID NO: 2293 - RNA, 12 nt, synthetic construct
  source 1..12: mol_type = other RNA
cccagtcctcat

SEQ ID NO: 2294 - RNA, 12 nt, synthetic construct
  source 1..12: mol_type = other RNA
tgaggactgggg

SEQ ID NO: 2295 - RNA, 12 nt, synthetic construct
  source 1..12: mol_type = other RNA
ccccagtcctca

SEQ ID NO: 2296 - RNA, 12 nt, synthetic construct
  source 1..12: mol_type = other RNA
gaggactgggga

SEQ ID NO: 2297 - RNA, 12 nt, synthetic construct
  source 1..12: mol_type = other RNA
tccccagtcctc

SEQ ID NO: 2298 - RNA, 12 nt, synthetic construct
  source 1..12: mol_type = other RNA
aggactggggag

SEQ ID NO: 2299 - RNA, 12 nt, synthetic construct
  source 1..12: mol_type = other RNA
ctccccagtcct

SEQ ID NO: 2300 - RNA, 12 nt, synthetic construct
  source 1..12: mol_type = other RNA
ggactggggagg

SEQ ID NO: 2301 - RNA, 12 nt, synthetic construct
  source 1..12: mol_type = other RNA
cctccccagtcc

SEQ ID NO: 2302 - RNA, 12 nt, synthetic construct
  source 1..12: mol_type = other RNA
gactggggaggg

SEQ ID NO: 2303 - RNA, 12 nt, synthetic construct
  source 1..12: mol_type = other RNA
ccctccccagtc

SEQ ID NO: 2304 - RNA, 12 nt, synthetic construct
  source 1..12: mol_type = other RNA
actggggagggc

SEQ ID NO: 2305 - RNA, 12 nt, synthetic construct
  source 1..12: mol_type = other RNA
gccctccccagt

SEQ ID NO: 2306 - RNA, 12 nt, synthetic construct
  source 1..12: mol_type = other RNA
ctggggagggct

SEQ ID NO: 2307 - RNA, 12 nt, synthetic construct
  source 1..12: mol_type = other RNA
agccctccccag

SEQ ID NO: 2308 - RNA, 12 nt, synthetic construct
  source 1..12: mol_type = other RNA
tggggagggctt

SEQ ID NO: 2309 - RNA, 12 nt, synthetic construct
  source 1..12: mol_type = other RNA
aagccctcccca

SEQ ID NO: 2310 - RNA, 12 nt, synthetic construct
  source 1..12: mol_type = other RNA
ggggagggcttt

SEQ ID NO: 2311 - RNA, 12 nt, synthetic construct
  source 1..12: mol_type = other RNA
aaagccctcccc

SEQ ID NO: 2312 - RNA, 12 nt, synthetic construct
  source 1..12: mol_type = other RNA
gggagggctttc

SEQ ID NO: 2313 - RNA, 12 nt, synthetic construct
  source 1..12: mol_type = other RNA
gaaagccctccc

SEQ ID NO: 2314 - RNA, 12 nt, synthetic construct
  source 1..12: mol_type = other RNA
ggagggctttct

SEQ ID NO: 2315 - RNA, 12 nt, synthetic construct
  source 1..12: mol_type = other RNA
agaaagccctcc

SEQ ID NO: 2316 - RNA, 12 nt, synthetic construct
  source 1..12: mol_type = other RNA
gagggctttctt

SEQ ID NO: 2317 - RNA, 12 nt, synthetic construct
  source 1..12: mol_type = other RNA
aagaaagccctc

SEQ ID NO: 2318 - RNA, 12 nt, synthetic construct
  source 1..12: mol_type = other RNA
agggctttcttt

SEQ ID NO: 2319 - RNA, 12 nt, synthetic construct
  source 1..12: mol_type = other RNA
aaagaaagccct

SEQ ID NO: 2320 - RNA, 12 nt, synthetic construct
  source 1..12: mol_type = other RNA
gggctttctttg

SEQ ID NO: 2321 - RNA, 12 nt, synthetic construct
  source 1..12: mol_type = other RNA
caaagaaagccc

SEQ ID NO: 2322 - RNA, 12 nt, synthetic construct
  source 1..12: mol_type = other RNA
ggctttctttgt

SEQ ID NO: 2323 - RNA, 12 nt, synthetic construct
  source 1..12: mol_type = other RNA
acaaagaaagcc

SEQ ID NO: 2324 - RNA, 12 nt, synthetic construct
  source 1..12: mol_type = other RNA
gctttctttgtg

SEQ ID NO: 2325 - RNA, 12 nt, synthetic construct
  source 1..12: mol_type = other RNA
cacaaagaaagc

SEQ ID NO: 2326 - RNA, 12 nt, synthetic construct
  source 1..12: mol_type = other RNA
ctttctttgtgt

SEQ ID NO: 2327 - RNA, 12 nt, synthetic construct
  source 1..12: mol_type = other RNA
acacaaagaaag

SEQ ID NO: 2328 - RNA, 12 nt, synthetic construct
  source 1..12: mol_type = other RNA
tttctttgtgta

SEQ ID NO: 2329 - RNA, 12 nt, synthetic construct
  source 1..12: mol_type = other RNA
tacacaaagaaa

SEQ ID NO: 2330 - RNA, 12 nt, synthetic construct
  source 1..12: mol_type = other RNA
ttctttgtgtat

SEQ ID NO: 2331 - RNA, 12 nt, synthetic construct
  source 1..12: mol_type = other RNA
atacacaaagaa

SEQ ID NO: 2332 - RNA, 12 nt, synthetic construct
  source 1..12: mol_type = other RNA
tctttgtgtatt

SEQ ID NO: 2333 - RNA, 12 nt, synthetic construct
  source 1..12: mol_type = other RNA
aatacacaaaga

SEQ ID NO: 2334 - RNA, 12 nt, synthetic construct
  source 1..12: mol_type = other RNA
ctttgtgtattt

SEQ ID NO: 2335 - RNA, 12 nt, synthetic construct
  source 1..12: mol_type = other RNA
aaatacacaaag

SEQ ID NO: 2336 - RNA, 12 nt, synthetic construct
  source 1..12: mol_type = other RNA
tttgtgtatttg

SEQ ID NO: 2337 - RNA, 12 nt, synthetic construct
  source 1..12: mol_type = other RNA
caaatacacaaa

SEQ ID NO: 2338 - RNA, 12 nt, synthetic construct
  source 1..12: mol_type = other RNA
ttgtgtatttgc

SEQ ID NO: 2339 - RNA, 12 nt, synthetic construct
  source 1..12: mol_type = other RNA
gcaaatacacaa

SEQ ID NO: 2340 - RNA, 12 nt, synthetic construct
  source 1..12: mol_type = other RNA
tgtgtatttgcc

SEQ ID NO: 2341 - RNA, 12 nt, synthetic construct
  source 1..12: mol_type = other RNA
ggcaaatacaca

SEQ ID NO: 2342 - RNA, 12 nt, synthetic construct
  source 1..12: mol_type = other RNA
gtgtatttgcca

SEQ ID NO: 2343 - RNA, 12 nt, synthetic construct
  source 1..12: mol_type = other RNA
tggcaaatacac

SEQ ID NO: 2344 - RNA, 12 nt, synthetic construct
  source 1..12: mol_type = other RNA
tgtatttgccat

SEQ ID NO: 2345 - RNA, 12 nt, synthetic construct
  source 1..12: mol_type = other RNA
atggcaaataca

SEQ ID NO: 2346 - RNA, 12 nt, synthetic construct
  source 1..12: mol_type = other RNA
gtatttgccata

SEQ ID NO: 2347 - RNA, 12 nt, synthetic construct
  source 1..12: mol_type = other RNA
tatggcaaatac

SEQ ID NO: 2348 - RNA, 12 nt, synthetic construct
  source 1..12: mol_type = other RNA
tatttgccataa

SEQ ID NO: 2349 - RNA, 12 nt, synthetic construct
  source 1..12: mol_type = other RNA
ttatggcaaata

SEQ ID NO: 2350 - RNA, 12 nt, synthetic construct
  source 1..12: mol_type = other RNA
atttgccataaa

SEQ ID NO: 2351 - RNA, 12 nt, synthetic construct
  source 1..12: mol_type = other RNA
tttatggcaaat

SEQ ID NO: 2352 - RNA, 12 nt, synthetic construct
  source 1..12: mol_type = other RNA
tttgccataaat

SEQ ID NO: 2353 - RNA, 12 nt, synthetic construct
  source 1..12: mol_type = other RNA
atttatggcaaa

SEQ ID NO: 2354 - RNA, 12 nt, synthetic construct
  source 1..12: mol_type = other RNA
ttgccataaata

SEQ ID NO: 2355 - RNA, 12 nt, synthetic construct
  source 1..12: mol_type = other RNA
tatttatggcaa

SEQ ID NO: 2356 - RNA, 12 nt, synthetic construct
  source 1..12: mol_type = other RNA
tgccataaataa

SEQ ID NO: 2357 - RNA, 12 nt, synthetic construct
  source 1..12: mol_type = other RNA
ttatttatggca

SEQ ID NO: 2358 - RNA, 12 nt, synthetic construct
  source 1..12: mol_type = other RNA
gccataaataat

SEQ ID NO: 2359 - RNA, 12 nt, synthetic construct
  source 1..12: mol_type = other RNA
attatttatggc

SEQ ID NO: 2360 - RNA, 12 nt, synthetic construct
  source 1..12: mol_type = other RNA
ccataaataata

SEQ ID NO: 2361 - RNA, 12 nt, synthetic construct
  source 1..12: mol_type = other RNA
tattatttatgg

SEQ ID NO: 2362 - RNA, 12 nt, synthetic construct
  source 1..12: mol_type = other RNA
cataaataatac

SEQ ID NO: 2363 - RNA, 12 nt, synthetic construct
  source 1..12: mol_type = other RNA
gtattatttatg

SEQ ID NO: 2364 - RNA, 12 nt, synthetic construct
  source 1..12: mol_type = other RNA
ataaataatact

SEQ ID NO: 2365 - RNA, 12 nt, synthetic construct
  source 1..12: mol_type = other RNA
agtattatttat

SEQ ID NO: 2366 - RNA, 12 nt, synthetic construct
  source 1..12: mol_type = other RNA
taaataatacta

SEQ ID NO: 2367 - RNA, 12 nt, synthetic construct
  source 1..12: mol_type = other RNA
tagtattattta

SEQ ID NO: 2368 - RNA, 12 nt, synthetic construct
  source 1..12: mol_type = other RNA
aaataatactaa

SEQ ID NO: 2369 - RNA, 12 nt, synthetic construct
  source 1..12: mol_type = other RNA
ttagtattattt

SEQ ID NO: 2370 - RNA, 12 nt, synthetic construct
  source 1..12: mol_type = other RNA
aataatactaaa

SEQ ID NO: 2371 - RNA, 12 nt, synthetic construct
  source 1..12: mol_type = other RNA
tttagtattatt

SEQ ID NO: 2372 - RNA, 12 nt, synthetic construct
  source 1..12: mol_type = other RNA
ataatactaaat

SEQ ID NO: 2373 - RNA, 12 nt, synthetic construct
  source 1..12: mol_type = other RNA
atttagtattat

SEQ ID NO: 2374 - RNA, 12 nt, synthetic construct
  source 1..12: mol_type = other RNA
taatactaaatc

SEQ ID NO: 2375 - RNA, 12 nt, synthetic construct
  source 1..12: mol_type = other RNA
gatttagtatta

SEQ ID NO: 2376 - RNA, 12 nt, synthetic construct
  source 1..12: mol_type = other RNA
aatactaaatca

SEQ ID NO: 2377 - RNA, 12 nt, synthetic construct
  source 1..12: mol_type = other RNA
tgatttagtatt

SEQ ID NO: 2378 - RNA, 12 nt, synthetic construct
  source 1..12: mol_type = other RNA
atactaaatcat

SEQ ID NO: 2379 - RNA, 12 nt, synthetic construct
  source 1..12: mol_type = other RNA
atgatttagtat

SEQ ID NO: 2380 - RNA, 12 nt, synthetic construct
  source 1..12: mol_type = other RNA
tactaaatcatt

SEQ ID NO: 2381 - RNA, 12 nt, synthetic construct
  source 1..12: mol_type = other RNA
aatgatttagta

SEQ ID NO: 2382 - RNA, 12 nt, synthetic construct
  source 1..12: mol_type = other RNA
actaaatcattt

SEQ ID NO: 2383 - RNA, 12 nt, synthetic construct
  source 1..12: mol_type = other RNA
aaatgatttagt

SEQ ID NO: 2384 - RNA, 12 nt, synthetic construct
  source 1..12: mol_type = other RNA
ctaaatcatttg

SEQ ID NO: 2385 - RNA, 12 nt, synthetic construct
  source 1..12: mol_type = other RNA
caaatgatttag

SEQ ID NO: 2386 - RNA, 12 nt, synthetic construct
  source 1..12: mol_type = other RNA
taaatcatttga

SEQ ID NO: 2387 - RNA, 12 nt, synthetic construct
  source 1..12: mol_type = other RNA
tcaaatgattta

SEQ ID NO: 2388 - RNA, 12 nt, synthetic construct
  source 1..12: mol_type = other RNA
aaatcatttgaa

SEQ ID NO: 2389 - RNA, 12 nt, synthetic construct
  source 1..12: mol_type = other RNA
ttcaaatgattt

SEQ ID NO: 2390 - RNA, 12 nt, synthetic construct
  source 1..12: mol_type = other RNA
aatcatttgaag

SEQ ID NO: 2391 - RNA, 12 nt, synthetic construct
  source 1..12: mol_type = other RNA
cttcaaatgatt

SEQ ID NO: 2392 - RNA, 12 nt, synthetic construct
  source 1..12: mol_type = other RNA
atcatttgaaga

SEQ ID NO: 2393 - RNA, 12 nt, synthetic construct
  source 1..12: mol_type = other RNA
tcttcaaatgat

SEQ ID NO: 2394 - RNA, 12 nt, synthetic construct
  source 1..12: mol_type = other RNA
tcatttgaagat

SEQ ID NO: 2395 - RNA, 12 nt, synthetic construct
  source 1..12: mol_type = other RNA
atcttcaaatga

SEQ ID NO: 2396 - RNA, 12 nt, synthetic construct
  source 1..12: mol_type = other RNA
catttgaagata

SEQ ID NO: 2397 - RNA, 12 nt, synthetic construct
  source 1..12: mol_type = other RNA
tatcttcaaatg

SEQ ID NO: 2398 - RNA, 12 nt, synthetic construct
  source 1..12: mol_type = other RNA
atttgaagatat

SEQ ID NO: 2399 - RNA, 12 nt, synthetic construct
  source 1..12: mol_type = other RNA
atatcttcaaat

SEQ ID NO: 2400 - RNA, 12 nt, synthetic construct
  source 1..12: mol_type = other RNA
tttgaagatatt

SEQ ID NO: 2401 - RNA, 12 nt, synthetic construct
  source 1..12: mol_type = other RNA
aatatcttcaaa

SEQ ID NO: 2402 - RNA, 12 nt, synthetic construct
  source 1..12: mol_type = other RNA
ttgaagatattc

SEQ ID NO: 2403 - RNA, 12 nt, synthetic construct
  source 1..12: mol_type = other RNA
gaatatcttcaa

SEQ ID NO: 2404 - RNA, 12 nt, synthetic construct
  source 1..12: mol_type = other RNA
tgaagatattca

SEQ ID NO: 2405 - RNA, 12 nt, synthetic construct
  source 1..12: mol_type = other RNA
tgaatatcttca

SEQ ID NO: 2406 - RNA, 12 nt, synthetic construct
  source 1..12: mol_type = other RNA
gaagatattcac

SEQ ID NO: 2407 - RNA, 12 nt, synthetic construct
  source 1..12: mol_type = other RNA
gtgaatatcttc

SEQ ID NO: 2408 - RNA, 12 nt, synthetic construct
  source 1..12: mol_type = other RNA
aagatattcacc

SEQ ID NO: 2409 - RNA, 12 nt, synthetic construct
  source 1..12: mol_type = other RNA
ggtgaatatctt

SEQ ID NO: 2410 - RNA, 12 nt, synthetic construct
  source 1..12: mol_type = other RNA
agatattcacca

SEQ ID NO: 2411 - RNA, 12 nt, synthetic construct
  source 1..12: mol_type = other RNA
tggtgaatatct

SEQ ID NO: 2412 - RNA, 12 nt, synthetic construct
  source 1..12: mol_type = other RNA
gatattcaccat

SEQ ID NO: 2413 - RNA, 12 nt, synthetic construct
  source 1..12: mol_type = other RNA
atggtgaatatc

SEQ ID NO: 2414 - RNA, 12 nt, synthetic construct
  source 1..12: mol_type = other RNA
atattcaccatt

SEQ ID NO: 2415 - RNA, 12 nt, synthetic construct
  source 1..12: mol_type = other RNA
aatggtgaatat

SEQ ID NO: 2416 - RNA, 12 nt, synthetic construct
  source 1..12: mol_type = other RNA
tattcaccatta

SEQ ID NO: 2417 - RNA, 12 nt, synthetic construct
  source 1..12: mol_type = other RNA
taatggtgaata

SEQ ID NO: 2418 - RNA, 12 nt, synthetic construct
  source 1..12: mol_type = other RNA
attcaccattat

SEQ ID NO: 2419 - RNA, 12 nt, synthetic construct
  source 1..12: mol_type = other RNA
ataatggtgaat

SEQ ID NO: 2420 - RNA, 12 nt, synthetic construct
  source 1..12: mol_type = other RNA
ttcaccattata

SEQ ID NO: 2421 - RNA, 12 nt, synthetic construct
  source 1..12: mol_type = other RNA
tataatggtgaa

SEQ ID NO: 2422 - RNA, 12 nt, synthetic construct
  source 1..12: mol_type = other RNA
tcaccattatag

SEQ ID NO: 2423 - RNA, 12 nt, synthetic construct
  source 1..12: mol_type = other RNA
ctataatggtga

SEQ ID NO: 2424 - RNA, 12 nt, synthetic construct
  source 1..12: mol_type = other RNA
caccattataga

SEQ ID NO: 2425 - RNA, 12 nt, synthetic construct
  source 1..12: mol_type = other RNA
tctataatggtg

SEQ ID NO: 2426 - RNA, 12 nt, synthetic construct
  source 1..12: mol_type = other RNA
accattatagag

SEQ ID NO: 2427 - RNA, 12 nt, synthetic construct
  source 1..12: mol_type = other RNA
ctctataatggt

SEQ ID NO: 2428 - RNA, 12 nt, synthetic construct
  source 1..12: mol_type = other RNA
ccattatagaga

SEQ ID NO: 2429 - RNA, 12 nt, synthetic construct
  source 1..12: mol_type = other RNA
tctctataatgg

SEQ ID NO: 2430 - RNA, 12 nt, synthetic construct
  source 1..12: mol_type = other RNA
cattatagagaa

SEQ ID NO: 2431 - RNA, 12 nt, synthetic construct
  source 1..12: mol_type = other RNA
ttctctataatg

SEQ ID NO: 2432 - RNA, 12 nt, synthetic construct
  source 1..12: mol_type = other RNA
attatagagaac

SEQ ID NO: 2433 - RNA, 12 nt, synthetic construct
  source 1..12: mol_type = other RNA
gttctctataat

SEQ ID NO: 2434 - RNA, 12 nt, synthetic construct
  source 1..12: mol_type = other RNA
ttatagagaaca

SEQ ID NO: 2435 - RNA, 12 nt, synthetic construct
  source 1..12: mol_type = other RNA
tgttctctataa

SEQ ID NO: 2436 - RNA, 12 nt, synthetic construct
  source 1..12: mol_type = other RNA
tatagagaacaa

SEQ ID NO: 2437 - RNA, 12 nt, synthetic construct
  source 1..12: mol_type = other RNA
ttgttctctata

SEQ ID NO: 2438 - RNA, 12 nt, synthetic construct
  source 1..12: mol_type = other RNA
atagagaacaaa

SEQ ID NO: 2439 - RNA, 12 nt, synthetic construct
  source 1..12: mol_type = other RNA
tttgttctctat

SEQ ID NO: 2440 - RNA, 12 nt, synthetic construct
  source 1..12: mol_type = other RNA
tagagaacaaat

SEQ ID NO: 2441 - RNA, 12 nt, synthetic construct
  source 1..12: mol_type = other RNA
atttgttctcta

SEQ ID NO: 2442 - RNA, 12 nt, synthetic construct
  source 1..12: mol_type = other RNA
agagaacaaatt

SEQ ID NO: 2443 - RNA, 12 nt, synthetic construct
  source 1..12: mol_type = other RNA
aatttgttctct

SEQ ID NO: 2444 - RNA, 12 nt, synthetic construct
  source 1..12: mol_type = other RNA
gagaacaaatta

SEQ ID NO: 2445 - RNA, 12 nt, synthetic construct
  source 1..12: mol_type = other RNA
taatttgttctc

SEQ ID NO: 2446 - RNA, 12 nt, synthetic construct
  source 1..12: mol_type = other RNA
agaacaaattaa

SEQ ID NO: 2447 - RNA, 12 nt, synthetic construct
  source 1..12: mol_type = other RNA
ttaatttgttct

SEQ ID NO: 2448 - RNA, 12 nt, synthetic construct
  source 1..12: mol_type = other RNA
gaacaaattaaa

SEQ ID NO: 2449 - RNA, 12 nt, synthetic construct
  source 1..12: mol_type = other RNA
tttaatttgttc

SEQ ID NO: 2450 - RNA, 12 nt, synthetic construct
  source 1..12: mol_type = other RNA
aacaaattaaaa

SEQ ID NO: 2451 - RNA, 12 nt, synthetic construct
  source 1..12: mol_type = other RNA
ttttaatttgtt

SEQ ID NO: 2452 - RNA, 12 nt, synthetic construct
  source 1..12: mol_type = other RNA
acaaattaaaag

SEQ ID NO: 2453 - RNA, 12 nt, synthetic construct
  source 1..12: mol_type = other RNA
cttttaatttgt

SEQ ID NO: 2454 - RNA, 12 nt, synthetic construct
  source 1..12: mol_type = other RNA
caaattaaaaga

SEQ ID NO: 2455 - RNA, 12 nt, synthetic construct
  source 1..12: mol_type = other RNA
tcttttaatttg

SEQ ID NO: 2456 - RNA, 12 nt, synthetic construct
  source 1..12: mol_type = other RNA
aaattaaaagag

SEQ ID NO: 2457 - RNA, 12 nt, synthetic construct
  source 1..12: mol_type = other RNA
ctcttttaattt

SEQ ID NO: 2458 - RNA, 12 nt, synthetic construct
  source 1..12: mol_type = other RNA
aattaaaagagt

SEQ ID NO: 2459 - RNA, 12 nt, synthetic construct
  source 1..12: mol_type = other RNA
actcttttaatt

SEQ ID NO: 2460 - RNA, 12 nt, synthetic construct
  source 1..12: mol_type = other RNA
attaaaagagtt

SEQ ID NO: 2461 - RNA, 12 nt, synthetic construct
  source 1..12: mol_type = other RNA
aactcttttaat

SEQ ID NO: 2462 - RNA, 12 nt, synthetic construct
  source 1..12: mol_type = other RNA
ttaaaagagtta

SEQ ID NO: 2463 - RNA, 12 nt, synthetic construct
  source 1..12: mol_type = other RNA
taactcttttaa

SEQ ID NO: 2464 - RNA, 12 nt, synthetic construct
  source 1..12: mol_type = other RNA
taaaagagttaa

SEQ ID NO: 2465 - RNA, 12 nt, synthetic construct
  source 1..12: mol_type = other RNA
ttaactctttta

SEQ ID NO: 2466 - RNA, 12 nt, synthetic construct
  source 1..12: mol_type = other RNA
aaaagagttaag

SEQ ID NO: 2467 - RNA, 12 nt, synthetic construct
  source 1..12: mol_type = other RNA
cttaactctttt

SEQ ID NO: 2468 - RNA, 12 nt, synthetic construct
  source 1..12: mol_type = other RNA
aaagagttaagg

SEQ ID NO: 2469 - RNA, 12 nt, synthetic construct
  source 1..12: mol_type = other RNA
ccttaactcttt

SEQ ID NO: 2470 - RNA, 12 nt, synthetic construct
  source 1..12: mol_type = other RNA
aagagttaagga

SEQ ID NO: 2471 - RNA, 12 nt, synthetic construct
  source 1..12: mol_type = other RNA
tccttaactctt

SEQ ID NO: 2472 - RNA, 12 nt, synthetic construct
  source 1..12: mol_type = other RNA
agagttaaggac

SEQ ID NO: 2473 - RNA, 12 nt, synthetic construct
  source 1..12: mol_type = other RNA
gtccttaactct

SEQ ID NO: 2474 - RNA, 12 nt, synthetic construct
  source 1..12: mol_type = other RNA
gagttaaggact

SEQ ID NO: 2475 - RNA, 12 nt, synthetic construct
  source 1..12: mol_type = other RNA
agtccttaactc

SEQ ID NO: 2476 - RNA, 12 nt, synthetic construct
  source 1..12: mol_type = other RNA
agttaaggactc

SEQ ID NO: 2477 - RNA, 12 nt, synthetic construct
  source 1..12: mol_type = other RNA
gagtccttaact

SEQ ID NO: 2478 - RNA, 12 nt, synthetic construct
  source 1..12: mol_type = other RNA
gttaaggactct

SEQ ID NO: 2479 - RNA, 12 nt, synthetic construct
  source 1..12: mol_type = other RNA
agagtccttaac

SEQ ID NO: 2480 - RNA, 12 nt, synthetic construct
  source 1..12: mol_type = other RNA
ttaaggactctg

SEQ ID NO: 2481 - RNA, 12 nt, synthetic construct
  source 1..12: mol_type = other RNA
cagagtccttaa

SEQ ID NO: 2482 - RNA, 12 nt, synthetic construct
  source 1..12: mol_type = other RNA
taaggactctga

SEQ ID NO: 2483 - RNA, 12 nt, synthetic construct
  source 1..12: mol_type = other RNA
tcagagtcctta

SEQ ID NO: 2484 - RNA, 12 nt, synthetic construct
  source 1..12: mol_type = other RNA
aaggactctgaa

SEQ ID NO: 2485 - RNA, 12 nt, synthetic construct
  source 1..12: mol_type = other RNA
ttcagagtcctt

SEQ ID NO: 2486 - RNA, 12 nt, synthetic construct
  source 1..12: mol_type = other RNA
aggactctgaag

SEQ ID NO: 2487 - RNA, 12 nt, synthetic construct
  source 1..12: mol_type = other RNA
cttcagagtcct

SEQ ID NO: 2488 - RNA, 12 nt, synthetic construct
  source 1..12: mol_type = other RNA
ggactctgaaga

SEQ ID NO: 2489 - RNA, 12 nt, synthetic construct
  source 1..12: mol_type = other RNA
tcttcagagtcc

SEQ ID NO: 2490 - RNA, 12 nt, synthetic construct
  source 1..12: mol_type = other RNA
gactctgaagat

SEQ ID NO: 2491 - RNA, 12 nt, synthetic construct
  source 1..12: mol_type = other RNA
atcttcagagtc

SEQ ID NO: 2492 - RNA, 12 nt, synthetic construct
  source 1..12: mol_type = other RNA
actctgaagatg

SEQ ID NO: 2493 - RNA, 12 nt, synthetic construct
  source 1..12: mol_type = other RNA
catcttcagagt

SEQ ID NO: 2494 - RNA, 12 nt, synthetic construct
  source 1..12: mol_type = other RNA
ctctgaagatgt

SEQ ID NO: 2495 - RNA, 12 nt, synthetic construct
  source 1..12: mol_type = other RNA
acatcttcagag

SEQ ID NO: 2496 - RNA, 12 nt, synthetic construct
  source 1..12: mol_type = other RNA
tctgaagatgta

SEQ ID NO: 2497 - RNA, 12 nt, synthetic construct
  source 1..12: mol_type = other RNA
tacatcttcaga

SEQ ID NO: 2498 - RNA, 12 nt, synthetic construct
  source 1..12: mol_type = other RNA
ctgaagatgtac

SEQ ID NO: 2499 - RNA, 12 nt, synthetic construct
  source 1..12: mol_type = other RNA
gtacatcttcag

SEQ ID NO: 2500 - RNA, 12 nt, synthetic construct
  source 1..12: mol_type = other RNA
tgaagatgtacc

SEQ ID NO: 2501 - RNA, 12 nt, synthetic construct
  source 1..12: mol_type = other RNA
ggtacatcttca

SEQ ID NO: 2502 - RNA, 12 nt, synthetic construct
  source 1..12: mol_type = other RNA
gaagatgtacct

SEQ ID NO: 2503 - RNA, 12 nt, synthetic construct
  source 1..12: mol_type = other RNA
aggtacatcttc

SEQ ID NO: 2504 - RNA, 12 nt, synthetic construct
  source 1..12: mol_type = other RNA
aagatgtaccta

SEQ ID NO: 2505 - RNA, 12 nt, synthetic construct
  source 1..12: mol_type = other RNA
taggtacatctt

SEQ ID NO: 2506 - RNA, 12 nt, synthetic construct
  source 1..12: mol_type = other RNA
agatgtacctat

SEQ ID NO: 2507 - RNA, 12 nt, synthetic construct
  source 1..12: mol_type = other RNA
ataggtacatct

SEQ ID NO: 2508 - RNA, 12 nt, synthetic construct
  source 1..12: mol_type = other RNA
gatgtacctatg

SEQ ID NO: 2509 - RNA, 12 nt, synthetic construct
  source 1..12: mol_type = other RNA
cataggtacatc

SEQ ID NO: 2510 - RNA, 12 nt, synthetic construct
  source 1..12: mol_type = other RNA
atgtacctatgg

SEQ ID NO: 2511 - RNA, 12 nt, synthetic construct
  source 1..12: mol_type = other RNA
ccataggtacat

SEQ ID NO: 2512 - RNA, 12 nt, synthetic construct
  source 1..12: mol_type = other RNA
tgtacctatggt

SEQ ID NO: 2513 - RNA, 12 nt, synthetic construct
  source 1..12: mol_type = other RNA
accataggtaca

SEQ ID NO: 2514 - RNA, 12 nt, synthetic construct
  source 1..12: mol_type = other RNA
gtacctatggtc

SEQ ID NO: 2515 - RNA, 12 nt, synthetic construct
  source 1..12: mol_type = other RNA
gaccataggtac

SEQ ID NO: 2516 - RNA, 12 nt, synthetic construct
  source 1..12: mol_type = other RNA
tacctatggtcc

SEQ ID NO: 2517 - RNA, 12 nt, synthetic construct
  source 1..12: mol_type = other RNA
ggaccataggta

SEQ ID NO: 2518 - RNA, 12 nt, synthetic construct
  source 1..12: mol_type = other RNA
acctatggtcct

SEQ ID NO: 2519 - RNA, 12 nt, synthetic construct
  source 1..12: mol_type = other RNA
aggaccataggt

SEQ ID NO: 2520 - RNA, 12 nt, synthetic construct
  source 1..12: mol_type = other RNA
cctatggtccta

SEQ ID NO: 2521 - RNA, 12 nt, synthetic construct
  source 1..12: mol_type = other RNA
taggaccatagg

SEQ ID NO: 2522 - RNA, 12 nt, synthetic construct
  source 1..12: mol_type = other RNA
ctatggtcctag

SEQ ID NO: 2523 - RNA, 12 nt, synthetic construct
  source 1..12: mol_type = other RNA
ctaggaccatag

SEQ ID NO: 2524 - RNA, 12 nt, synthetic construct
  source 1..12: mol_type = other RNA
tatggtcctagt

SEQ ID NO: 2525 - RNA, 12 nt, synthetic construct
  source 1..12: mol_type = other RNA
actaggaccata

SEQ ID NO: 2526 - RNA, 12 nt, synthetic construct
  source 1..12: mol_type = other RNA
atggtcctagta

SEQ ID NO: 2527 - RNA, 12 nt, synthetic construct
  source 1..12: mol_type = other RNA
tactaggaccat

SEQ ID NO: 2528 - RNA, 12 nt, synthetic construct
  source 1..12: mol_type = other RNA
tggtcctagtag

SEQ ID NO: 2529 - RNA, 12 nt, synthetic construct
  source 1..12: mol_type = other RNA
ctactaggacca

SEQ ID NO: 2530 - RNA, 12 nt, synthetic construct
  source 1..12: mol_type = other RNA
ggtcctagtagg

SEQ ID NO: 2531 - RNA, 12 nt, synthetic construct
  source 1..12: mol_type = other RNA
cctactaggacc

SEQ ID NO: 2532 - RNA, 12 nt, synthetic construct
  source 1..12: mol_type = other RNA
gtcctagtagga

SEQ ID NO: 2533 - RNA, 12 nt, synthetic construct
  source 1..12: mol_type = other RNA
tcctactaggac

SEQ ID NO: 2534 - RNA, 12 nt, synthetic construct
  source 1..12: mol_type = other RNA
tcctagtaggaa

SEQ ID NO: 2535 - RNA, 12 nt, synthetic construct
  source 1..12: mol_type = other RNA
ttcctactagga

SEQ ID NO: 2536 - RNA, 12 nt, synthetic construct
  source 1..12: mol_type = other RNA
cctagtaggaaa

SEQ ID NO: 2537 - RNA, 12 nt, synthetic construct
  source 1..12: mol_type = other RNA
tttcctactagg

SEQ ID NO: 2538 - RNA, 12 nt, synthetic construct
  source 1..12: mol_type = other RNA
ctagtaggaaat

SEQ ID NO: 2539 - RNA, 12 nt, synthetic construct
  source 1..12: mol_type = other RNA
atttcctactag

SEQ ID NO: 2540 - RNA, 12 nt, synthetic construct
  source 1..12: mol_type = other RNA
tagtaggaaata

SEQ ID NO: 2541 - RNA, 12 nt, synthetic construct
  source 1..12: mol_type = other RNA
tatttcctacta

SEQ ID NO: 2542 - RNA, 12 nt, synthetic construct
  source 1..12: mol_type = other RNA
agtaggaaataa

SEQ ID NO: 2543 - RNA, 12 nt, synthetic construct
  source 1..12: mol_type = other RNA
ttatttcctact

SEQ ID NO: 2544 - RNA, 12 nt, synthetic construct
  source 1..12: mol_type = other RNA
gtaggaaataaa

SEQ ID NO: 2545 - RNA, 12 nt, synthetic construct
  source 1..12: mol_type = other RNA
tttatttcctac

SEQ ID NO: 2546 - RNA, 12 nt, synthetic construct
  source 1..12: mol_type = other RNA
taggaaataaat

SEQ ID NO: 2547 - RNA, 12 nt, synthetic construct
  source 1..12: mol_type = other RNA
atttatttccta

SEQ ID NO: 2548 - RNA, 12 nt, synthetic construct
  source 1..12: mol_type = other RNA
aggaaataaatg

SEQ ID NO: 2549 - RNA, 12 nt, synthetic construct
  source 1..12: mol_type = other RNA
catttatttcct

SEQ ID NO: 2550 - RNA, 12 nt, synthetic construct
  source 1..12: mol_type = other RNA
ggaaataaatgt

SEQ ID NO: 2551 - RNA, 12 nt, synthetic construct
  source 1..12: mol_type = other RNA
acatttatttcc

SEQ ID NO: 2552 - RNA, 12 nt, synthetic construct
  source 1..12: mol_type = other RNA
gaaataaatgtg

SEQ ID NO: 2553 - RNA, 12 nt, synthetic construct
  source 1..12: mol_type = other RNA
cacatttatttc

SEQ ID NO: 2554 - RNA, 12 nt, synthetic construct
  source 1..12: mol_type = other RNA
aaataaatgtga

SEQ ID NO: 2555 - RNA, 12 nt, synthetic construct
  source 1..12: mol_type = other RNA
tcacatttattt

SEQ ID NO: 2556 - RNA, 12 nt, synthetic construct
  source 1..12: mol_type = other RNA
aataaatgtgat

SEQ ID NO: 2557 - RNA, 12 nt, synthetic construct
  source 1..12: mol_type = other RNA
atcacatttatt

SEQ ID NO: 2558 - RNA, 12 nt, synthetic construct
  source 1..12: mol_type = other RNA
ataaatgtgatt

SEQ ID NO: 2559 - RNA, 12 nt, synthetic construct
  source 1..12: mol_type = other RNA
aatcacatttat

SEQ ID NO: 2560 - RNA, 12 nt, synthetic construct
  source 1..12: mol_type = other RNA
taaatgtgattt

SEQ ID NO: 2561 - RNA, 12 nt, synthetic construct
  source 1..12: mol_type = other RNA
aaatcacattta

SEQ ID NO: 2562 - RNA, 12 nt, synthetic construct
  source 1..12: mol_type = other RNA
aaatgtgatttg

SEQ ID NO: 2563 - RNA, 12 nt, synthetic construct
  source 1..12: mol_type = other RNA
caaatcacattt

SEQ ID NO: 2564 - RNA, 12 nt, synthetic construct
  source 1..12: mol_type = other RNA
aatgtgatttgc

SEQ ID NO: 2565 - RNA, 12 nt, synthetic construct
  source 1..12: mol_type = other RNA
gcaaatcacatt

SEQ ID NO: 2566 - RNA, 12 nt, synthetic construct
  source 1..12: mol_type = other RNA
atgtgatttgcc

SEQ ID NO: 2567 - RNA, 12 nt, synthetic construct
  source 1..12: mol_type = other RNA
ggcaaatcacat

SEQ ID NO: 2568 - RNA, 12 nt, synthetic construct
  source 1..12: mol_type = other RNA
tgtgatttgcct

SEQ ID NO: 2569 - RNA, 12 nt, synthetic construct
  source 1..12: mol_type = other RNA
aggcaaatcaca

SEQ ID NO: 2570 - RNA, 12 nt, synthetic construct
  source 1..12: mol_type = other RNA
gtgatttgcctt

SEQ ID NO: 2571 - RNA, 12 nt, synthetic construct
  source 1..12: mol_type = other RNA
aaggcaaatcac

SEQ ID NO: 2572 - RNA, 12 nt, synthetic construct
  source 1..12: mol_type = other RNA
tgatttgccttc

SEQ ID NO: 2573 - RNA, 12 nt, synthetic construct
  source 1..12: mol_type = other RNA
gaaggcaaatca

SEQ ID NO: 2574 - RNA, 12 nt, synthetic construct
  source 1..12: mol_type = other RNA
gatttgccttct

SEQ ID NO: 2575 - RNA, 12 nt, synthetic construct
  source 1..12: mol_type = other RNA
agaaggcaaatc

SEQ ID NO: 2576 - RNA, 12 nt, synthetic construct
  source 1..12: mol_type = other RNA
atttgccttcta

SEQ ID NO: 2577 - RNA, 12 nt, synthetic construct
  source 1..12: mol_type = other RNA
tagaaggcaaat

SEQ ID NO: 2578 - RNA, 12 nt, synthetic construct
  source 1..12: mol_type = other RNA
tttgccttctag

SEQ ID NO: 2579 - RNA, 12 nt, synthetic construct
  source 1..12: mol_type = other RNA
ctagaaggcaaa

SEQ ID NO: 2580 - RNA, 12 nt, synthetic construct
  source 1..12: mol_type = other RNA
ttgccttctaga

SEQ ID NO: 2581 - RNA, 12 nt, synthetic construct
  source 1..12: mol_type = other RNA
tctagaaggcaa

SEQ ID NO: 2582 - RNA, 12 nt, synthetic construct
  source 1..12: mol_type = other RNA
tgccttctagaa

SEQ ID NO: 2583 - RNA, 12 nt, synthetic construct
  source 1..12: mol_type = other RNA
ttctagaaggca

SEQ ID NO: 2584 - RNA, 12 nt, synthetic construct
  source 1..12: mol_type = other RNA
gccttctagaac

SEQ ID NO: 2585 - RNA, 12 nt, synthetic construct
  source 1..12: mol_type = other RNA
gttctagaaggc

SEQ ID NO: 2586 - RNA, 12 nt, synthetic construct
  source 1..12: mol_type = other RNA
ccttctagaaca

SEQ ID NO: 2587 - RNA, 12 nt, synthetic construct
  source 1..12: mol_type = other RNA
tgttctagaagg

SEQ ID NO: 2588 - RNA, 12 nt, synthetic construct
  source 1..12: mol_type = other RNA
cttctagaacag

SEQ ID NO: 2589 - RNA, 12 nt, synthetic construct
  source 1..12: mol_type = other RNA
ctgttctagaag

SEQ ID NO: 2590 - RNA, 12 nt, synthetic construct
  source 1..12: mol_type = other RNA
ttctagaacagt

SEQ ID NO: 2591 - RNA, 12 nt, synthetic construct
  source 1..12: mol_type = other RNA
actgttctagaa

SEQ ID NO: 2592 - RNA, 12 nt, synthetic construct
  source 1..12: mol_type = other RNA
tctagaacagta

SEQ ID NO: 2593 - RNA, 12 nt, synthetic construct
  source 1..12: mol_type = other RNA
tactgttctaga

SEQ ID NO: 2594 - RNA, 12 nt, synthetic construct
  source 1..12: mol_type = other RNA
ctagaacagtag

SEQ ID NO: 2595 - RNA, 12 nt, synthetic construct
  source 1..12: mol_type = other RNA
ctactgttctag

SEQ ID NO: 2596 - RNA, 12 nt, synthetic construct
  source 1..12: mol_type = other RNA
tagaacagtaga

SEQ ID NO: 2597 - RNA, 12 nt, synthetic construct
  source 1..12: mol_type = other RNA
tctactgttcta

SEQ ID NO: 2598 - RNA, 12 nt, synthetic construct
  source 1..12: mol_type = other RNA
agaacagtagac

SEQ ID NO: 2599 - RNA, 12 nt, synthetic construct
  source 1..12: mol_type = other RNA
gtctactgttct

SEQ ID NO: 2600 - RNA, 12 nt, synthetic construct
  source 1..12: mol_type = other RNA
gaacagtagaca

SEQ ID NO: 2601 - RNA, 12 nt, synthetic construct
  source 1..12: mol_type = other RNA
tgtctactgttc

SEQ ID NO: 2602 - RNA, 12 nt, synthetic construct
  source 1..12: mol_type = other RNA
aacagtagacac

SEQ ID NO: 2603 - RNA, 12 nt, synthetic construct
  source 1..12: mol_type = other RNA
gtgtctactgtt

SEQ ID NO: 2604 - RNA, 12 nt, synthetic construct
  source 1..12: mol_type = other RNA
acagtagacaca

SEQ ID NO: 2605 - RNA, 12 nt, synthetic construct
  source 1..12: mol_type = other RNA
tgtgtctactgt

SEQ ID NO: 2606 - RNA, 12 nt, synthetic construct
  source 1..12: mol_type = other RNA
cagtagacacaa

SEQ ID NO: 2607 - RNA, 12 nt, synthetic construct
  source 1..12: mol_type = other RNA
ttgtgtctactg

SEQ ID NO: 2608 - RNA, 12 nt, synthetic construct
  source 1..12: mol_type = other RNA
agtagacacaaa

SEQ ID NO: 2609 - RNA, 12 nt, synthetic construct
  source 1..12: mol_type = other RNA
tttgtgtctact

SEQ ID NO: 2610 - RNA, 12 nt, synthetic construct
  source 1..12: mol_type = other RNA
gtagacacaaaa

SEQ ID NO: 2611 - RNA, 12 nt, synthetic construct
  source 1..12: mol_type = other RNA
ttttgtgtctac

SEQ ID NO: 2612 - RNA, 12 nt, synthetic construct
  source 1..12: mol_type = other RNA
tagacacaaaac

SEQ ID NO: 2613 - RNA, 12 nt, synthetic construct
  source 1..12: mol_type = other RNA
gttttgtgtcta

SEQ ID NO: 2614 - RNA, 12 nt, synthetic construct
  source 1..12: mol_type = other RNA
agacacaaaaca

SEQ ID NO: 2615 - RNA, 12 nt, synthetic construct
  source 1..12: mol_type = other RNA
tgttttgtgtct

SEQ ID NO: 2616 - RNA, 12 nt, synthetic construct
  source 1..12: mol_type = other RNA
gacacaaaacag

SEQ ID NO: 2617 - RNA, 12 nt, synthetic construct
  source 1..12: mol_type = other RNA
ctgttttgtgtc

SEQ ID NO: 2618 - RNA, 12 nt, synthetic construct
  source 1..12: mol_type = other RNA
acacaaaacagg

SEQ ID NO: 2619 - RNA, 12 nt, synthetic construct
  source 1..12: mol_type = other RNA
cctgttttgtgt

SEQ ID NO: 2620 - RNA, 12 nt, synthetic construct
  source 1..12: mol_type = other RNA
cacaaaacaggc

SEQ ID NO: 2621 - RNA, 12 nt, synthetic construct
  source 1..12: mol_type = other RNA
gcctgttttgtg

SEQ ID NO: 2622 - RNA, 12 nt, synthetic construct
  source 1..12: mol_type = other RNA
acaaaacaggct

SEQ ID NO: 2623 - RNA, 12 nt, synthetic construct
  source 1..12: mol_type = other RNA
agcctgttttgt

SEQ ID NO: 2624 - RNA, 12 nt, synthetic construct
  source 1..12: mol_type = other RNA
caaaacaggctc

SEQ ID NO: 2625 - RNA, 12 nt, synthetic construct
  source 1..12: mol_type = other RNA
gagcctgttttg

SEQ ID NO: 2626 - RNA, 12 nt, synthetic construct
  source 1..12: mol_type = other RNA
aaaacaggctca

SEQ ID NO: 2627 - RNA, 12 nt, synthetic construct
  source 1..12: mol_type = other RNA
tgagcctgtttt

SEQ ID NO: 2628 - RNA, 12 nt, synthetic construct
  source 1..12: mol_type = other RNA
aaacaggctcag

SEQ ID NO: 2629 - RNA, 12 nt, synthetic construct
  source 1..12: mol_type = other RNA
ctgagcctgttt

SEQ ID NO: 2630 - RNA, 12 nt, synthetic construct
  source 1..12: mol_type = other RNA
aacaggctcagg

SEQ ID NO: 2631 - RNA, 12 nt, synthetic construct
  source 1..12: mol_type = other RNA
cctgagcctgtt

SEQ ID NO: 2632 - RNA, 12 nt, synthetic construct
  source 1..12: mol_type = other RNA
acaggctcagga

SEQ ID NO: 2633 - RNA, 12 nt, synthetic construct
  source 1..12: mol_type = other RNA
tcctgagcctgt

SEQ ID NO: 2634 - RNA, 12 nt, synthetic construct
  source 1..12: mol_type = other RNA
caggctcaggac

SEQ ID NO: 2635 - RNA, 12 nt, synthetic construct
  source 1..12: mol_type = other RNA
gtcctgagcctg

SEQ ID NO: 2636 - RNA, 12 nt, synthetic construct
  source 1..12: mol_type = other RNA
aggctcaggact

SEQ ID NO: 2637 - RNA, 12 nt, synthetic construct
  source 1..12: mol_type = other RNA
agtcctgagcct

SEQ ID NO: 2638 - RNA, 12 nt, synthetic construct
  source 1..12: mol_type = other RNA
ggctcaggactt

SEQ ID NO: 2639 - RNA, 12 nt, synthetic construct
  source 1..12: mol_type = other RNA
aagtcctgagcc

SEQ ID NO: 2640 - RNA, 12 nt, synthetic construct
  source 1..12: mol_type = other RNA
gctcaggactta

SEQ ID NO: 2641 - RNA, 12 nt, synthetic construct
  source 1..12: mol_type = other RNA
taagtcctgagc

SEQ ID NO: 2642 - RNA, 12 nt, synthetic construct
  source 1..12: mol_type = other RNA
ctcaggacttag

SEQ ID NO: 2643 - RNA, 12 nt, synthetic construct
  source 1..12: mol_type = other RNA
ctaagtcctgag

SEQ ID NO: 2644 - RNA, 12 nt, synthetic construct
  source 1..12: mol_type = other RNA
tcaggacttagc

SEQ ID NO: 2645 - RNA, 12 nt, synthetic construct
  source 1..12: mol_type = other RNA
gctaagtcctga

SEQ ID NO: 2646 - RNA, 12 nt, synthetic construct
  source 1..12: mol_type = other RNA
caggacttagca

SEQ ID NO: 2647 - RNA, 12 nt, synthetic construct
  source 1..12: mol_type = other RNA
tgctaagtcctg

SEQ ID NO: 2648 - RNA, 12 nt, synthetic construct
  source 1..12: mol_type = other RNA
aggacttagcaa

SEQ ID NO: 2649 - RNA, 12 nt, synthetic construct
  source 1..12: mol_type = other RNA
ttgctaagtcct

SEQ ID NO: 2650 - RNA, 12 nt, synthetic construct
  source 1..12: mol_type = other RNA
ggacttagcaag

SEQ ID NO: 2651 - RNA, 12 nt, synthetic construct
  source 1..12: mol_type = other RNA
cttgctaagtcc

SEQ ID NO: 2652 - RNA, 12 nt, synthetic construct
  source 1..12: mol_type = other RNA
gacttagcaaga

SEQ ID NO: 2653 - RNA, 12 nt, synthetic construct
  source 1..12: mol_type = other RNA
tcttgctaagtc

SEQ ID NO: 2654 - RNA, 12 nt, synthetic construct
  source 1..12: mol_type = other RNA
acttagcaagaa

SEQ ID NO: 2655 - RNA, 12 nt, synthetic construct
  source 1..12: mol_type = other RNA
ttcttgctaagt

SEQ ID NO: 2656 - RNA, 12 nt, synthetic construct
  source 1..12: mol_type = other RNA
cttagcaagaag

SEQ ID NO: 2657 - RNA, 12 nt, synthetic construct
  source 1..12: mol_type = other RNA
cttcttgctaag

SEQ ID NO: 2658 - RNA, 12 nt, synthetic construct
  source 1..12: mol_type = other RNA
ttagcaagaagt

SEQ ID NO: 2659 - RNA, 12 nt, synthetic construct
  source 1..12: mol_type = other RNA
acttcttgctaa

SEQ ID NO: 2660 - RNA, 12 nt, synthetic construct
  source 1..12: mol_type = other RNA
tagcaagaagtt

SEQ ID NO: 2661 - RNA, 12 nt, synthetic construct
  source 1..12: mol_type = other RNA
aacttcttgcta

SEQ ID NO: 2662 - RNA, 12 nt, synthetic construct
  source 1..12: mol_type = other RNA
agcaagaagtta

SEQ ID NO: 2663 - RNA, 12 nt, synthetic construct
  source 1..12: mol_type = other RNA
taacttcttgct

SEQ ID NO: 2664 - RNA, 12 nt, synthetic construct
  source 1..12: mol_type = other RNA
gcaagaagttat

SEQ ID NO: 2665 - RNA, 12 nt, synthetic construct
  source 1..12: mol_type = other RNA
ataacttcttgc

SEQ ID NO: 2666 - RNA, 12 nt, synthetic construct
  source 1..12: mol_type = other RNA
caagaagttatg

SEQ ID NO: 2667 - RNA, 12 nt, synthetic construct
  source 1..12: mol_type = other RNA
cataacttcttg

SEQ ID NO: 2668 - RNA, 12 nt, synthetic construct
  source 1..12: mol_type = other RNA
aagaagttatgg

SEQ ID NO: 2669 - RNA, 12 nt, synthetic construct
  source 1..12: mol_type = other RNA
ccataacttctt

SEQ ID NO: 2670 - RNA, 12 nt, synthetic construct
  source 1..12: mol_type = other RNA
agaagttatgga

SEQ ID NO: 2671 - RNA, 12 nt, synthetic construct
  source 1..12: mol_type = other RNA
tccataacttct

SEQ ID NO: 2672 - RNA, 12 nt, synthetic construct
  source 1..12: mol_type = other RNA
gaagttatggaa

SEQ ID NO: 2673 - RNA, 12 nt, synthetic construct
  source 1..12: mol_type = other RNA
ttccataacttc

SEQ ID NO: 2674 - RNA, 12 nt, synthetic construct
  source 1..12: mol_type = other RNA
aagttatggaat

SEQ ID NO: 2675 - RNA, 12 nt, synthetic construct
  source 1..12: mol_type = other RNA
attccataactt

SEQ ID NO: 2676 - RNA, 12 nt, synthetic construct
  source 1..12: mol_type = other RNA
agttatggaatt

SEQ ID NO: 2677 - RNA, 12 nt, synthetic construct
  source 1..12: mol_type = other RNA
aattccataact

SEQ ID NO: 2678 - RNA, 12 nt, synthetic construct
  source 1..12: mol_type = other RNA
gttatggaattc

SEQ ID NO: 2679 - RNA, 12 nt, synthetic construct
  source 1..12: mol_type = other RNA
gaattccataac

SEQ ID NO: 2680 - RNA, 12 nt, synthetic construct
  source 1..12: mol_type = other RNA
ttatggaattcc

SEQ ID NO: 2681 - RNA, 12 nt, synthetic construct
  source 1..12: mol_type = other RNA
ggaattccataa

SEQ ID NO: 2682 - RNA, 12 nt, synthetic construct
  source 1..12: mol_type = other RNA
tatggaattcct

SEQ ID NO: 2683 - RNA, 12 nt, synthetic construct
  source 1..12: mol_type = other RNA
aggaattccata

SEQ ID NO: 2684 - RNA, 12 nt, synthetic construct
  source 1..12: mol_type = other RNA
atggaattcctt

SEQ ID NO: 2685 - RNA, 12 nt, synthetic construct
  source 1..12: mol_type = other RNA
aaggaattccat

SEQ ID NO: 2686 - RNA, 12 nt, synthetic construct
  source 1..12: mol_type = other RNA
tggaattccttt

SEQ ID NO: 2687 - RNA, 12 nt, synthetic construct
  source 1..12: mol_type = other RNA
aaaggaattcca

SEQ ID NO: 2688 - RNA, 12 nt, synthetic construct
  source 1..12: mol_type = other RNA
ggaattcctttt

SEQ ID NO: 2689 - RNA, 12 nt, synthetic construct
  source 1..12: mol_type = other RNA
aaaaggaattcc

SEQ ID NO: 2690 - RNA, 12 nt, synthetic construct
  source 1..12: mol_type = other RNA
gaattcctttta

SEQ ID NO: 2691 - RNA, 12 nt, synthetic construct
  source 1..12: mol_type = other RNA
taaaaggaattc

SEQ ID NO: 2692 - RNA, 12 nt, synthetic construct
  source 1..12: mol_type = other RNA
aattccttttat

SEQ ID NO: 2693 - RNA, 12 nt, synthetic construct
  source 1..12: mol_type = other RNA
ataaaaggaatt

SEQ ID NO: 2694 - RNA, 12 nt, synthetic construct
  source 1..12: mol_type = other RNA
attccttttatt

SEQ ID NO: 2695 - RNA, 12 nt, synthetic construct
  source 1..12: mol_type = other RNA
aataaaaggaat

SEQ ID NO: 2696 - RNA, 12 nt, synthetic construct
  source 1..12: mol_type = other RNA
ttccttttattg

SEQ ID NO: 2697 - RNA, 12 nt, synthetic construct
  source 1..12: mol_type = other RNA
caataaaaggaa

SEQ ID NO: 2698 - RNA, 12 nt, synthetic construct
  source 1..12: mol_type = other RNA
tccttttattga

SEQ ID NO: 2699 - RNA, 12 nt, synthetic construct
  source 1..12: mol_type = other RNA
tcaataaaagga

SEQ ID NO: 2700 - RNA, 12 nt, synthetic construct
  source 1..12: mol_type = other RNA
ccttttattgaa

SEQ ID NO: 2701 - RNA, 12 nt, synthetic construct
  source 1..12: mol_type = other RNA
ttcaataaaagg

SEQ ID NO: 2702 - RNA, 12 nt, synthetic construct
  source 1..12: mol_type = other RNA
cttttattgaaa

SEQ ID NO: 2703 - RNA, 12 nt, synthetic construct
  source 1..12: mol_type = other RNA
tttcaataaaag

SEQ ID NO: 2704 - RNA, 12 nt, synthetic construct
  source 1..12: mol_type = other RNA
ttttattgaaac

SEQ ID NO: 2705 - RNA, 12 nt, synthetic construct
  source 1..12: mol_type = other RNA
gtttcaataaaa

SEQ ID NO: 2706 - RNA, 12 nt, synthetic construct
  source 1..12: mol_type = other RNA
tttattgaaaca

SEQ ID NO: 2707 - RNA, 12 nt, synthetic construct
  source 1..12: mol_type = other RNA
tgtttcaataaa

SEQ ID NO: 2708 - RNA, 12 nt, synthetic construct
  source 1..12: mol_type = other RNA
ttattgaaacat

SEQ ID NO: 2709 - RNA, 12 nt, synthetic construct
  source 1..12: mol_type = other RNA
atgtttcaataa

SEQ ID NO: 2710 - RNA, 12 nt, synthetic construct
  source 1..12: mol_type = other RNA
tattgaaacatc

SEQ ID NO: 2711 - RNA, 12 nt, synthetic construct
  source 1..12: mol_type = other RNA
gatgtttcaata

SEQ ID NO: 2712 - RNA, 12 nt, synthetic construct
  source 1..12: mol_type = other RNA
attgaaacatca

SEQ ID NO: 2713 - RNA, 12 nt, synthetic construct
  source 1..12: mol_type = other RNA
tgatgtttcaat

SEQ ID NO: 2714 - RNA, 12 nt, synthetic construct
  source 1..12: mol_type = other RNA
ttgaaacatcag

SEQ ID NO: 2715 - RNA, 12 nt, synthetic construct
  source 1..12: mol_type = other RNA
ctgatgtttcaa

SEQ ID NO: 2716 - RNA, 12 nt, synthetic construct
  source 1..12: mol_type = other RNA
tgaaacatcagc

SEQ ID NO: 2717 - RNA, 12 nt, synthetic construct
  source 1..12: mol_type = other RNA
gctgatgtttca

SEQ ID NO: 2718 - RNA, 12 nt, synthetic construct
  source 1..12: mol_type = other RNA
gaaacatcagca

SEQ ID NO: 2719 - RNA, 12 nt, synthetic construct
  source 1..12: mol_type = other RNA
tgctgatgtttc

SEQ ID NO: 2720 - RNA, 12 nt, synthetic construct
  source 1..12: mol_type = other RNA
aaacatcagcaa

SEQ ID NO: 2721 - RNA, 12 nt, synthetic construct
  source 1..12: mol_type = other RNA
ttgctgatgttt

SEQ ID NO: 2722 - RNA, 12 nt, synthetic construct
  source 1..12: mol_type = other RNA
aacatcagcaaa

SEQ ID NO: 2723 - RNA, 12 nt, synthetic construct
  source 1..12: mol_type = other RNA
tttgctgatgtt

SEQ ID NO: 2724 - RNA, 12 nt, synthetic construct
  source 1..12: mol_type = other RNA
acatcagcaaag

SEQ ID NO: 2725 - RNA, 12 nt, synthetic construct
  source 1..12: mol_type = other RNA
ctttgctgatgt

SEQ ID NO: 2726 - RNA, 12 nt, synthetic construct
  source 1..12: mol_type = other RNA
catcagcaaaga

SEQ ID NO: 2727 - RNA, 12 nt, synthetic construct
  source 1..12: mol_type = other RNA
tctttgctgatg

SEQ ID NO: 2728 - RNA, 12 nt, synthetic construct
  source 1..12: mol_type = other RNA
atcagcaaagac

SEQ ID NO: 2729 - RNA, 12 nt, synthetic construct
  source 1..12: mol_type = other RNA
gtctttgctgat

SEQ ID NO: 2730 - RNA, 12 nt, synthetic construct
  source 1..12: mol_type = other RNA
tcagcaaagaca

SEQ ID NO: 2731 - RNA, 12 nt, synthetic construct
  source 1..12: mol_type = other RNA
tgtctttgctga

SEQ ID NO: 2732 - RNA, 12 nt, synthetic construct
  source 1..12: mol_type = other RNA
cagcaaagacaa

SEQ ID NO: 2733 - RNA, 12 nt, synthetic construct
  source 1..12: mol_type = other RNA
ttgtctttgctg

SEQ ID NO: 2734 - RNA, 12 nt, synthetic construct
  source 1..12: mol_type = other RNA
agcaaagacaag

SEQ ID NO: 2735 - RNA, 12 nt, synthetic construct
  source 1..12: mol_type = other RNA
cttgtctttgct

SEQ ID NO: 2736 - RNA, 12 nt, synthetic construct
  source 1..12: mol_type = other RNA
gcaaagacaaga

SEQ ID NO: 2737 - RNA, 12 nt, synthetic construct
  source 1..12: mol_type = other RNA
tcttgtctttgc

SEQ ID NO: 2738 - RNA, 12 nt, synthetic construct
  source 1..12: mol_type = other RNA
caaagacaagac

SEQ ID NO: 2739 - RNA, 12 nt, synthetic construct
  source 1..12: mol_type = other RNA
gtcttgtctttg

SEQ ID NO: 2740 - RNA, 12 nt, synthetic construct
  source 1..12: mol_type = other RNA
aaagacaagaca

SEQ ID NO: 2741 - RNA, 12 nt, synthetic construct
  source 1..12: mol_type = other RNA
tgtcttgtcttt

SEQ ID NO: 2742 - DNA, 19 bp, synthetic construct
  source 1..19: mol_type = other DNA
tctctataatggtgaatat

SEQ ID NO: 2743 - DNA, 19 bp, synthetic construct
  source 1..19: mol_type = other DNA
aaatacacaaagaaagccc

SEQ ID NO: 2744 - DNA, 19 bp, synthetic construct
  source 1..19: mol_type = other DNA
tttatttcctactaggacc

SEQ ID NO: 2745 - DNA, 19 bp, synthetic construct
  source 1..19: mol_type = other DNA
tttcctactaggaccatag

SEQ ID NO: 2746 - DNA, 19 bp, synthetic construct
  source 1..19: mol_type = other DNA
tttaatttgttctctataa

SEQ ID NO: 2747 - DNA, 19 bp, synthetic construct
  source 1..19: mol_type = other DNA
agctccaactaccacaagt

SEQ ID NO: 2748 - DNA, 19 bp, synthetic construct
  source 1..19: mol_type = other DNA
tcaattactacttgcttcc

SEQ ID NO: 2749 - DNA, 19 bp, synthetic construct
  source 1..19: mol_type = other DNA
atcaattactacttgcttc

SEQ ID NO: 2750 - DNA, 19 bp, synthetic construct
  source 1..19: mol_type = other DNA
attagctgtatcgtcaagg

SEQ ID NO: 2751 - DNA, 19 bp, synthetic construct
  source 1..19: mol_type = other DNA
ttctccatcaattactact

SEQ ID NO: 2752 - DNA, 19 bp, synthetic construct
  source 1..19: mol_type = other DNA
tcgagaatatccaagagac

SEQ ID NO: 2753 - DNA, 19 bp, synthetic construct
  source 1..19: mol_type = other DNA
gatttagtattatttatgg

SEQ ID NO: 2754 - DNA, 19 bp, synthetic construct
  source 1..19: mol_type = other DNA
atatcttcaaatgatttag

SEQ ID NO: 2755 - DNA, 19 bp, synthetic construct
  source 1..19: mol_type = other DNA
tctagaaggcaaatcacat

SEQ ID NO: 2756 - DNA, 19 bp, synthetic construct
  source 1..19: mol_type = other DNA
tgtctactgttctagaagg

SEQ ID NO: 2757 - DNA, 19 bp, synthetic construct
  source 1..19: mol_type = other DNA
aattccataacttcttgct

SEQ ID NO: 2758 - DNA, 19 bp, synthetic construct
  source 1..19: mol_type = other DNA
aataaaaggaattccataa

SEQ ID NO: 2759 - DNA, 19 bp, synthetic construct
  source 1..19: mol_type = other DNA
ataacttcttgctaagtcc

SEQ ID NO: 2760 - DNA, 19 bp, synthetic construct
  source 1..19: mol_type = other DNA
atcaattactacttgcttc

SEQ ID NO: 2761 - DNA, 19 bp, synthetic construct
  source 1..19: mol_type = other DNA
tcaattactacttgcttcc

SEQ ID NO: 2762 - DNA, 19 bp, synthetic construct
  source 1..19: mol_type = other DNA
tttcctactaggaccatag

SEQ ID NO: 2763 - DNA, 19 bp, synthetic construct
  source 1..19: mol_type = other DNA
taactttacattcatcagg

SEQ ID NO: 2764 - DNA, 19 bp, synthetic construct
  source 1..19: mol_type = other DNA
ttatttcctactaggacca

SEQ ID NO: 2765 - DNA, 19 bp, synthetic construct
  source 1..19: mol_type = other DNA
aatctagttatgactattc

SEQ ID NO: 2766 - DNA, 19 bp, synthetic construct
  source 1..19: mol_type = other DNA
tatctttattaaattctcc

SEQ ID NO: 2767 - DNA, 19 bp, synthetic construct
  source 1..19: mol_type = other DNA
tttatttcctactaggacc

SEQ ID NO: 2768 - DNA, 19 bp, synthetic construct
  source 1..19: mol_type = other DNA
aattccataacttcttgct

SEQ ID NO: 2769 - DNA, 19 bp, synthetic construct
  source 1..19: mol_type = other DNA
tctataatggtgaatatct

SEQ ID NO: 2770 - DNA, 19 bp, synthetic construct
  source 1..19: mol_type = other DNA
gaagcaagtagtaattgat

SEQ ID NO: 2771 - DNA, 19 bp, synthetic construct
  source 1..19: mol_type = other DNA
ggaagcaagtagtaattga

SEQ ID NO: 2772 - DNA, 19 bp, synthetic construct
  source 1..19: mol_type = other DNA
ctatggtcctagtaggaaa

SEQ ID NO: 2773 - DNA, 19 bp, synthetic construct
  source 1..19: mol_type = other DNA
cctgatgaatgtaaagtta

SEQ ID NO: 2774 - DNA, 19 bp, synthetic construct
  source 1..19: mol_type = other DNA
tggtcctagtaggaaataa

SEQ ID NO: 2775 - DNA, 19 bp, synthetic construct
  source 1..19: mol_type = other DNA
gaatagtcataactagatt

SEQ ID NO: 2776 - DNA, 19 bp, synthetic construct
  source 1..19: mol_type = other DNA
ggagaatttaataaagata

SEQ ID NO: 2777 - DNA, 19 bp, synthetic construct
  source 1..19: mol_type = other DNA
ggtcctagtaggaaataaa

SEQ ID NO: 2778 - DNA, 19 bp, synthetic construct
  source 1..19: mol_type = other DNA
agcaagaagttatggaatt

SEQ ID NO: 2779 - DNA, 19 bp, synthetic construct
  source 1..19: mol_type = other DNA
agatattcaccattataga

SEQ ID NO: 2780 - DNA, 19 bp, synthetic construct
  source 1..19: mol_type = other DNA
gatttagtattatttatgg

SEQ ID NO: 2781 - DNA, 19 bp, synthetic construct
  source 1..19: mol_type = other DNA
agctccaactaccacaagt

SEQ ID NO: 2782 - DNA, 19 bp, synthetic construct
  source 1..19: mol_type = other DNA
ttatttatggcaaatacac

SEQ ID NO: 2783 - DNA, 19 bp, synthetic construct
  source 1..19: mol_type = other DNA
aataaaaggaattccataa

SEQ ID NO: 2784 - DNA, 19 bp, synthetic construct
  source 1..19: mol_type = other DNA
ttctccatcaattactact

SEQ ID NO: 2785 - DNA, 19 bp, synthetic construct
  source 1..19: mol_type = other DNA
ttctctataatggtgaata

SEQ ID NO: 2786 - DNA, 19 bp, synthetic construct
  source 1..19: mol_type = other DNA
aaatacacaaagaaagccc

SEQ ID NO: 2787 - DNA, 19 bp, synthetic construct
  source 1..19: mol_type = other DNA
tttaatttgttctctataa

SEQ ID NO: 2788 - DNA, 19 bp, synthetic construct
  source 1..19: mol_type = other DNA
tctctataatggtgaatat

SEQ ID NO: 2789 - DNA, 19 bp, synthetic construct
  source 1..19: mol_type = other DNA
tctagaaggcaaatcacat

SEQ ID NO: 2790 - DNA, 19 bp, synthetic construct
  source 1..19: mol_type = other DNA
ccataaataatactaaatc

SEQ ID NO: 2791 - DNA, 19 bp, synthetic construct
  source 1..19: mol_type = other DNA
acttgtggtagttggagct

SEQ ID NO: 2792 - DNA, 19 bp, synthetic construct
  source 1..19: mol_type = other DNA
gtgtatttgccataaataa

SEQ ID NO: 2793 - DNA, 19 bp, synthetic construct
  source 1..19: mol_type = other DNA
ttatggaattccttttatt

SEQ ID NO: 2794 - DNA, 19 bp, synthetic construct
  source 1..19: mol_type = other DNA
agtagtaattgatggagaa

SEQ ID NO: 2795 - DNA, 19 bp, synthetic construct
  source 1..19: mol_type = other DNA
tattcaccattatagagaa

SEQ ID NO: 2796 - DNA, 19 bp, synthetic construct
  source 1..19: mol_type = other DNA
gggctttctttgtgtattt

SEQ ID NO: 2797 - DNA, 19 bp, synthetic construct
  source 1..19: mol_type = other DNA
ttatagagaacaaattaaa

SEQ ID NO: 2798 - DNA, 19 bp, synthetic construct
  source 1..19: mol_type = other DNA
atattcaccattatagaga

SEQ ID NO: 2799 - DNA, 19 bp, synthetic construct
  source 1..19: mol_type = other DNA
atgtgatttgccttctaga

SEQ ID NO: 2800 - DNA, 19 bp, synthetic construct
  source 1..19: mol_type = other DNA
aatcacatttatttcctac

SEQ ID NO: 2801 - DNA, 19 bp, synthetic construct
  source 1..19: mol_type = other DNA
gtttctccatcaattacta

SEQ ID NO: 2802 - DNA, 19 bp, synthetic construct
  source 1..19: mol_type = other DNA
atatcttcaaatgatttag

SEQ ID NO: 2803 - DNA, 19 bp, synthetic construct
  source 1..19: mol_type = other DNA
tttcaataaaaggaattcc

SEQ ID NO: 2804 - DNA, 19 bp, synthetic construct
  source 1..19: mol_type = other DNA
cttgctaagtcctgagcct

SEQ ID NO: 2805 - DNA, 19 bp, synthetic construct
  source 1..19: mol_type = other DNA
ctgatgtttcaataaaagg

SEQ ID NO: 2806 - DNA, 19 bp, synthetic construct
  source 1..19: mol_type = other DNA
taatttgttctctataatg

SEQ ID NO: 2807 - DNA, 19 bp, synthetic construct
  source 1..19: mol_type = other DNA
atcttcaaatgatttagta

SEQ ID NO: 2808 - DNA, 19 bp, synthetic construct
  source 1..19: mol_type = other DNA
atcgtcaaggcactcttgc

SEQ ID NO: 2809 - DNA, 19 bp, synthetic construct
  source 1..19: mol_type = other DNA
tgtctactgttctagaagg

SEQ ID NO: 2810 - DNA, 19 bp, synthetic construct
  source 1..19: mol_type = other DNA
gtaggaaataaatgtgatt

SEQ ID NO: 2811 - DNA, 19 bp, synthetic construct
  source 1..19: mol_type = other DNA
tagtaattgatggagaaac

SEQ ID NO: 2812 - DNA, 19 bp, synthetic construct
  source 1..19: mol_type = other DNA
ctaaatcatttgaagatat

SEQ ID NO: 2813 - DNA, 19 bp, synthetic construct
  source 1..19: mol_type = other DNA
ggaattccttttattgaaa

SEQ ID NO: 2814 - DNA, 19 bp, synthetic construct
  source 1..19: mol_type = other DNA
aggctcaggacttagcaag

SEQ ID NO: 2815 - DNA, 19 bp, synthetic construct
  source 1..19: mol_type = other DNA
ccttttattgaaacatcag

SEQ ID NO: 2816 - DNA, 19 bp, synthetic construct
  source 1..19: mol_type = other DNA
cattatagagaacaaatta

SEQ ID NO: 2817 - DNA, 19 bp, synthetic construct
  source 1..19: mol_type = other DNA
tactaaatcatttgaagat

SEQ ID NO: 2818 - DNA, 19 bp, synthetic construct
  source 1..19: mol_type = other DNA
gcaagagtgccttgacgat

SEQ ID NO: 2819 - DNA, 19 bp, synthetic construct
  source 1..19: mol_type = other DNA
ccttctagaacagtagaca

SEQ ID NO: 2820 - DNA, 19 bp, synthetic construct
  source 1..19: mol_type = other DNA
attagctgtatcgtcaagg

SEQ ID NO: 2821 - DNA, 19 bp, synthetic construct
  source 1..19: mol_type = other DNA
tcgagaatatccaagagac

SEQ ID NO: 2822 - DNA, 19 bp, synthetic construct
  source 1..19: mol_type = other DNA
tcttcagagtccttaactc

SEQ ID NO: 2823 - DNA, 19 bp, synthetic construct
  source 1..19: mol_type = other DNA
ataacttcttgctaagtcc

SEQ ID NO: 2824 - DNA, 19 bp, synthetic construct
  source 1..19: mol_type = other DNA
aatgattctgaattagctg

SEQ ID NO: 2825 - DNA, 19 bp, synthetic construct
  source 1..19: mol_type = other DNA
tataatggtgaatatcttc

SEQ ID NO: 2826 - DNA, 19 bp, synthetic construct
  source 1..19: mol_type = other DNA
tatcgtcaaggcactcttg

SEQ ID NO: 2827 - DNA, 19 bp, synthetic construct
  source 1..19: mol_type = other DNA
tattgttggatcatattcg

SEQ ID NO: 2828 - DNA, 19 bp, synthetic construct
  source 1..19: mol_type = other DNA
ccttgacgatacagctaat

SEQ ID NO: 2829 - DNA, 19 bp, synthetic construct
  source 1..19: mol_type = other DNA
gtctcttggatattctcga

SEQ ID NO: 2830 - DNA, 19 bp, synthetic construct
  source 1..19: mol_type = other DNA
gagttaaggactctgaaga

SEQ ID NO: 2831 - DNA, 19 bp, synthetic construct
  source 1..19: mol_type = other DNA
ggacttagcaagaagttat

SEQ ID NO: 2832 - DNA, 19 bp, synthetic construct
  source 1..19: mol_type = other DNA
cagctaattcagaatcatt

SEQ ID NO: 2833 - DNA, 19 bp, synthetic construct
  source 1..19: mol_type = other DNA
gaagatattcaccattata

SEQ ID NO: 2834 - DNA, 19 bp, synthetic construct
  source 1..19: mol_type = other DNA
caagagtgccttgacgata

SEQ ID NO: 2835 - DNA, 19 bp, synthetic construct
  source 1..19: mol_type = other DNA
cgaatatgatccaacaata

1. A composition comprising a RNAi agent comprising a sense strand and an antisense strand, wherein the antisense strand comprises at least 19 contiguous nucleotides differing by 0, 1, or 2 nucleotides from the antisense strand of a RNAi agent specific to KRAS provided in Table 1.

2. The composition of claim 1, wherein the composition further comprises a second RNAi agent to KRAS.

3. The composition of claim 1, wherein the RNAi agent comprises at least one modified backbone and/or at least one 2′-modified nucleotide.

4. The composition of claim 1, wherein the RNAi agent is ligated to one or more agent selected from: diagnostic compound, reporter group, cross-linking agent, nuclease-resistance conferring moiety, natural or unusual nucleobase, lipophilic molecule, cholesterol, lipid, lectin, steroid, uvaol, hecogenin, diosgenin, terpene, triterpene, sarsasapogenin, Friedelin, epifriedelanol-derivatized lithocholic acid, vitamin, carbohydrate, dextran, pullulan, chitin, chitosan, synthetic carbohydrate, oligo lactate 15-mer, natural polymer, low- or medium-molecular weight polymer, inulin, cyclodextrin, hyaluronic acid, protein, protein-binding agent, integrin-targeting molecule, polycationic, peptide, polyamine, peptide mimic, and/or transferrin.

5. The composition of claim 1, wherein the RNAi agent comprises a phosphorothioate and/or a 2′-modified nucleotide.

6. The composition of claim 1, wherein all the pyrimidines are 2′ O-methyl-modified nucleotides.

7. The composition of claim 1, wherein all the pyrimidines are 2′ O-methyl-modified nucleotides.

8. The composition of claim 1, wherein the RNAi agent has an EC50 of no more than about 1 nM in MiaPaca2 cells.

9. The composition of claim 1, wherein the RNAi agent is capable of inhibiting expression of KRAS by at least about 70% at a concentration of 10 nM in RKO cells in vitro.

10. A method of treating a KRAS-related disease in an individual, the method comprising the step of administering to the individual a therapeutically effective amount of a composition comprising a RNAi agent comprising a sense strand and an antisense strand, wherein the antisense strand comprises at least 19 contiguous nucleotides differing by 0, 1, or 2 nucleotides from the antisense strand of a RNAi agent specific to KRAS provided in Table 1.

11. The method of claim 10, wherein the KRAS-related disease is a proliferative disease, cardio-facio-cutaneous (CFC) syndrome or Noonan syndrome.

12. The method of claim 10, wherein the method further comprises the step of administering an additional treatment for a proliferative disease, cardio-facio-cutaneous (CFC) syndrome or Noonan syndrome.

13. The method of claim 10, wherein the method further comprises the step of administering an additional RNAi agent to KRAS.

14. The method of claim 10, wherein the RNAi agent is ligated to one or more agent selected from: diagnostic compound, reporter group, cross-linking agent, nuclease-resistance conferring moiety, natural or unusual nucleobase, lipophilic molecule, cholesterol, lipid, lectin, steroid, uvaol, hecogenin, diosgenin, terpene, triterpene, sarsasapogenin, Friedelin, epifriedelanol-derivatized lithocholic acid, vitamin, carbohydrate, dextran, pullulan, chitin, chitosan, synthetic carbohydrate, oligo lactate 15-mer, natural polymer, low- or medium-molecular weight polymer, inulin, cyclodextrin, hyaluronic acid, protein, protein-binding agent, integrin-targeting molecule, polycationic, peptide, polyamine, peptide mimic, and/or transferrin.

15. A method of reducing KRAS levels in a subject, the method comprising the step of administering to the subject a composition comprising a RNAi agent comprising a sense strand and an antisense strand, wherein the antisense strand comprises at least 19 contiguous nucleotides differing by 0, 1, or 2 nucleotides from the antisense strand of a RNAi agent specific to KRAS provided in Table 1.

16. The method of claim 15, wherein the subject is a human.

17. The method of claim 15, wherein the RNAi agent is ligated to one or more agent selected from: diagnostic compound, reporter group, cross-linking agent, nuclease-resistance conferring moiety, natural or unusual nucleobase, lipophilic molecule, cholesterol, lipid, lectin, steroid, uvaol, hecogenin, diosgenin, terpene, triterpene, sarsasapogenin, Friedelin, epifriedelanol-derivatized lithocholic acid, vitamin, carbohydrate, dextran, pullulan, chitin, chitosan, synthetic carbohydrate, oligo lactate 15-mer, natural polymer, low- or medium-molecular weight polymer, inulin, cyclodextrin, hyaluronic acid, protein, protein-binding agent, integrin-targeting molecule, polycationic, peptide, polyamine, peptide mimic, and/or transferrin.
